United States Patent Application Publication US 2006/0135758 A1 - sequence listing, part 5

SEQ ID NO: 7929 - DNA, 1538 bp, Glycine max
ccctcgagccgaatcggttcgagggctcgagattttttgtgtttaccttcacctcccgtcagctactaggccccccccccgaagcatcttttcatcgttccgtgtttttcctttcttttttctctcactcgcagaaaattaacgcaattccacaaaagcggagaagctcgatggtttgaaagtgaaataaataaattgcactggattgggtttgcatgatgggcatgttcccttttgagccaagtttgtgaattgaagagaaggaagcaccgtagcagcgaaaaaaggatgagcgcagcggatgatgatgacccagaaaggagaagattgaatagtgggttgaagagctttcagcgcgatctgatggctggggcggtgatgggtggtgtggtgcacacgattgtggccccaattgagagggcgaagctattgttgcagacccaagagagcaacttggcgattgtggcgagtgggcgtcgcagattcaagggcatgttggattgcatagcccgtacggtcagggaagaaggcattctctctttgtggagaggcaatggcagcagtgttattcgttactatccttctgtcgctctcaatttctctctcaaggatctatacaaaagcatgttaagaggtggaaactctagtgacaatcttttgccaggtgccactgctaattttgcagcgggcgctgcagccggctgtacaacgcttgtgttggtatacccccttgatatagcacacacgcgccttgctgctgacattggaaggacagacgtgcgccaatttcgaggcatttaccatttcttggctaccatattccacaaggatggcatttgggggatctaccggggccttcctgcatctctacatgggatggtggtacacaggggcctttattttggaggctttgataccatgaaagagatcatgtctgaagaatcaaaacctgagttggcgttgtggaagcgttgggtggtagctcaggcagtcacaacctctgccgggttgatatcttatccactagacacggttcgtaggaggatgatgatgcaatctggcatggaacagccagtgtacaacagcaccttggactgctggaggaagatctataggacagaggggttggcttcattttaccgtggtgcagtttctaatgtgtttaggagcacaggagcagcagctatcttagtcttgtacgatgaggttaagaaatttatgaactgggggagaatttaacagcaccaacgttcattgatttcattttgacaccggagactcaacttcaatacgtcaacatgttgcaaatcttgaggcttaggataattttgtaaaagcacaaatgagctccattacagttcattagtaaatgtgtctttattggcattccaacgctaaggccattgattttgtggctttgctattactaattttcctttgtatcttttaagacgatggaagatcagaaatcagatatgatgaaaggggatttttattggcaaaaaaaaaaaaaaaaaattttgttgtctaattttttc

SEQ ID NO: 7930 - DNA, 1698 bp, Glycine max
acggatcactcattttctcaaagccaatttgaatttttacatgtaaaaaaaaaagcatagtttaaaaataattttagattaaaaaggacgaagagcaaggggggaaatgaaatttagaatctgccctaatcatcataactggaagaacctcttatcgaaggcgcgaaacttgatcagtgttggacgcgcttcctccgccgccgtcgccaacgccatgggtgacgttcagatccacaagaccaaactctgcatcatcggaagcggccccgccgcccataccgccgccgtctacgccgcccgtgcggagctgaagcctatcctcttcgagggctggatggccaacgacattgcccccggcggccagctcaccaccaccactgacgtcgagaacttccccggcttccccgacggcatcctcggcggcgagctcatggaccgctgccggagccagtccctccgcttcggcaccgagatccacaccgagaccgtctccaaggtcgatttctccgcccgtccttttagggttttcaccgattcccgcaccgtcgaggccgaatccgtcatcgtcgccaccggcgccgttgccaagcgcctccccttccccggctccggcgatggccccgatggctactggaaccgcggcatctccgcgtgcgccgtctgcgatggcgccgcgccgatcttccggaacaagccactggcggtgatcggcggcggggactcggcgatggaggaggccaccttcctcaccaagtacggttccgaggtttacataattcaccgcagggatacattcagggcttcgaagattatgcagagcaaggttatgggcaatagcaagattaaggtgatttggaattcggtggtggttgaggcttttgggggcggagataacaagagggtgcttgggggattgaaggtgaagaatgtggtgactcgagaggtatctgaattgaaggtttctgggttgtttttcgcaattgggcacgagcccgcaaccaagttcttggacgggcagcttgaattggattctgatggatatatagtgacgaagccggggacgacgaagaccagtgttgagggagtgtttgctgctggggatgttcaggacaagaagtataggcaagctattactgctgctggcactggatgcatggcagctttggatgcagaacattacctacaaaatgttggtttacaacaagataagagtgattgactagcttgggtgtgtccaaagatcagaagatgcttaatcagaagcaatgtttaattcctatagaagaatggatgcatcctaccagaatcttcatttgtgggttgcgacattcatatttttattgcagagcgagacttgcattattttttaagcagtgatgctcacgtgcacaagtacatgtattatgattattgggcttatgttacgtgcattattgtgacgatgcagagatatttgcttgcccggtgcaactcatgcattcatagacaggtattgctaccgttcatagactgctatgtgctatcctatccagtcctttttttttaagggaaaaaaaaacggtttgctcttcaggaaggggtaactcaaactatgttcagtttttagattggaaaattttaaaagtccatcaactcaatttgacctgatacgtggtgtttttttctttctttcaattttcttttcatattttatttgtc

SEQ ID NO: 7931 - DNA, 1495 bp, Glycine max
aagattaaaaaggacgaagagcaaggagggaaatgaaatttagaatctgccctaatcatcataactggaagaacctcttcacgaaagtgcgaaacttgatcagtgttggacgcgcttcctcctcctcctccgccgccgccaacgccatgggtgacgttcagatccacaagaccaaactctgcatcatcggaagcggtccctccgcccacacagccgccgtctacgccgctcgagccgagctgaagccgatcctcttcgagggctggatggccaacgacatcgcccccggcggccagctcaccaccaccaccgacgtcgagaacttccccgggttccccgacggcatcctcggcggcgagctcatggaacgctgccggagccagtcgctccgcttcggcaccgagatccacaccgagaccgtctccaaggtcgatttctcgaaccgtcctttcagggttttcaccgattcccgaaccgtcgaggccgaatccgtcatcgtcgccaccggtgccgtcgccaagcgcctccccttccccggctccggcgacggccccgaaggctactggaaccgtggaatctccgcgtgcgccgtctgcgacggcgccgccccgatcttccggaacaagccgctggcagtgatcggcggcggagactccgccatggaggaagccaccttcctcaccaagtacggttccgaagtttacataattcaccgtagggatacgttcagggcttcgaagattatgcagagcaaggtgatgaataatagtaagattaaggtgatttggaattcggtggtggttgaggcttttgggggcggagataacaagagggtgcttgggggattgaaggtgaagaatgtggtgactcaagaggtgtctgaattgaaggtttctgggttgtttttcgcaattgggcacgagcccgcgaccaagttcttggacgggcagcttgaattggattctgatggatatattgtgacgaagccggggacgacgaagaccagtgtggagggagtgtttgctgctggggatgttcaggacaagaagtataggcaagctattactgctgctggcactggatgcatggctgctttggatgcagaacattacctgcaaaatgttggtttacaacaagataagagtgattgactagcttgggtgtgtccggagatcagaaaatgcttaatcagaagcaatgtttaattcctatagaagaatagagaaatcagtctgcatcctactagaatctccatttgtgggttgctacattcatatttttattgcagacacagatttgcattattttttaagcagtgatgctcacgtgcaccagtacatgtattaagaatattatttattggccgcattttacgtgcattattgtgacaatgcagagatatttgctcgcacggtgtaactcatgcattcatagacgggaattgccaaaaaaaaaaaaaaaaaactatgggctatccaatccagtccattttttt

SEQ ID NO: 7932 - DNA, 1314 bp, Glycine max
  misc_feature (1291)..(1296): n is a, c, g, or t
tcagctacgtaggccccccccccgaaactgaagaaagatcccgattgggagcgaagaaagatggagtccccaatctcaatctgcgacactgagatccctcttctaatgcagagcatcgatgctttcaccgcttcttacgtcaaatccctccattccctcagagccagagcgcaagaaaccgctcgatgtcaagttcaactagacgaggttaaatctaaactcagagagaccgaggatgatttcgtcaaagcacttgcggtcaagacccgcaaagaggccaagcgaatggctttgatggatgctattgcttctgcaaaggctagagttgaagacctcaatgcatctattcaggagcagcgaaccaaaaagcaagaatatgctgcatttatatctcaacaatctctcgctttggcagcatctgaagggaagttaaatgaaagcattgaacagaatgatgaaacacaggccatttcctggtacaatagggtccttggttttcatgtaaaagggcgggacgtggggtaaaattcacattcaagaatataaatatgaacaatccagatgaggagtacttttttactatcttccatgaaaatgatacatactcattgttaagctgtgaacattccctcagggacaccaaagagttgatccatgaattaaacaagacaaatgatctatttaaatttgtcagaataatgaggaaaaagttccaagaagttgtggcacaagggaatttagttgtgacaaaagatgaacatgaagaatctgcctttaactctgcttctgctccagttttatcaatgtcatctgttagaagtgattttctaggcaaggaaaatgagcatcaagctgaacctatagaaggcaataaacagttcaaaaaacaaaatgttcatagaaggctaaaatcatcagttttatctcctggatctgcatcatctgttcgccagtctcctcgtttgaaggctaggaaataaagtcgaggggaggatgctagccacctcatttgttgatacaagctgaggtctctgaagtgctcctgtagggataactcatgactcaggtcgctaagagctaacaaattgacacaattccagacatttctgcattctagttctagatgtctgaatctgtacatattgatcagatgatctccacaaaatgggtgaaacatgaaactaaattgggagacaggaaatttgttgtaagtttaaaaaatcttgtattgtctaggctattaaatgtttgccttgtgtaaattagtcaaaattactcaataaataaaccnnnnnnttatgatgttacatcttt

SEQ ID NO: 7933 - DNA, 900 bp, Glycine max
accaggagagaactagtctcgagtttttttttttttttttttttttttttttttttttttactatcttccatgaaaatgatacatactcattgttaagctgtgaacattccctcagggacaccaaagagttgatccatgaattaaacaagacaaatgatctatttaaattggtcagaataatgaggaaaaagttcctagaagttgtggcactagggaatttagttgtgacaaaagatgaacatgaagaatctgcctttaactctgcttctgctccagttttatcaatgtcatctgttagaagtgattttctaggcaaggaaaatgagcatcaagctgaacctacagaaggcaataaacagttcaaaaaacaaaatgttcatagaaggctaaaatcatcagttttatctcctggatctgcatcatctgttcgccagtctcctcgtttgaaggctaggaaataaagtcgaggggaggatgctagccacctcatttgttgatacaagctgaggtctctgaagtgctcctgtagggataactcatgactcaggtcgctaagagctaacaaattgacacaattccagacatttctgcattctagttctagatgtctgaatctgtacatattgatcagatgatctccacaaaatgggtgaaacatgaaactaaattgggagacaggaaatttgttgtaagttctaaaaaatcttgtattgtctatggctatttaaattgtttgccttgttgctaaattagtcaaaattactcaattaaataaacattagtcattatgatgttgacatcttttattagcaatgtaagtgaagcaatgtattagaatgggtattcctgatcttttattttttttccttgtgttaacaaatttcaatttaaccaaaaaa

SEQ ID NO: 7934 - DNA, 2289 bp, Glycine max
tcagctacgtaggccccccccccgttttaataaagacctgggaggtgaacttccaaagtccaactggagtactccactaaggctcttggatctcactttcactgctttctcgggaaacattcccgattccattggccatttgaaatctcttaaagaactatatatggggagttgcaattttgatggactgattccctcatcattgtttaatctaactcaactctccggtatagatctatcgattaataaattagttggccccattccctcatcattgtttaatctaactcaactctccggtatagatctatcgattaataaattagttggccccattccatattggttttattctttgccttccttgttagacttggatcttagcaacaaccacctcacggggtcaattggtgaattctcatcttattctttgaaatacttgtcactctctaataacaaactgcaaggtaattttccaaattcaatatttgaactccaaaatcttactgatttgagtttgtcatcaactgacttgagtggtcatctggactttcatcaattttcaaagttgaaaaatctaaattacctcgaactttctcacaatagttttctctctattaactttgatagtattgctgactatttcttatcccccaaccttgaatacttaaatttatcttcctgtaatattaatagtttccctaaattcatagcaccacttcaaaatcttatccgactagatgtttctcataacaacattcgtggaagcattccccagtggtttcatgagaagctcttgcactcctggaataacattactcatattgatctcagtttcaacaaattgcaaggagatctcccaattccacccaatggcattagatactttttagtctcaaataatgagctgaccgggaacattccttcagcaatatgcaatgcaagctccctctatatactcaacttggctcataacaacttgacaggccagattctgcaatgcctggcaacatttccttctcttttggcattggatttgcaaatgaacaacctttatggaaacatacctgcgaacttttctaagggaaatgcattggagactataaagttgaatggcaaccaattggatggaccattaccatggtctttggcccactgcacaaatctggaagttttggacctggcagacaataacataaaggatacatttccccattggctagaaagcctccaggagttacaggtactcagtttgcgatcaaataagtttcatggtgtcatcacttgtttcggtgccaaacatccatttctcaggctgagaatttttgatgtctcaaataacaattttagtgggtccttgccagcatcatacatcaagaactttcgaggaatgatgagtgtgaatgacaaccaaactggttcgaaatatatgggtaaccaatatttctataatgattcagtagtggttgtaatgaaaggtcaatacatggagctcgagaggatattaactatttttacaaccattgatttatcaaataatatgtttgaaggagaacttctgaaagtccttggcgaattgcattctctcaaagggcttaacctttcgcacaatgcaatcacgggtaccattccacgatcctttggtaatttaagaaatttggaatggttggacctctcgtggaaccagttgaaaggagagattcctgtgtctttgatcaatttgaattttctggctgtgttgaacctttcacaaaaccagtttgagggtatcatacctacaggtggacagtttaacacatttggaaatgattcctatgcgggaaatccaatgctatgtggattccctttgtcaaaatcctgcaataaggatgaagattggtcaccacattcaacatttcaccttgaagaatcaggatttggctggaaagctgtagcagtgggatatgcatgtgggtttctatttggaatgcttttgggatataatgctttcatgactgggaaaccacaatggctcgcgagacttgttgaaggtgtgcttaattaattaatgaagagtgaaaaggacaaatcatagggaaaggaaatagtttatccttagtttaatatggttctttggtgtgtgtctgtatgttttctgtaattttaacttatgtcctttgtgtaacaaatcacatctctcttgactcgagtgatgtatttcaagttgtttaaaaataagaaaaaaaattgatgatagtagatatcaaaatgagtggtcatcacatgtgatgatattggctcctaaaaaaa

SEQ ID NO: 7935 - DNA, 1399 bp, Glycine max
  misc_feature (834)..(834): n is a, c, g, or t
tgggtaccgggccccccaaaaagagaaagaatgactgaaattaaattacgtaacctaacccagtgaagcgcagtggcagtgaagcggaggtggcggagaagggaggcagagaggttttggcaatttctctgttctactggtaagcgaaaatgaattattcagtgcgacgagtgttgccaatgtcaagggttgttcttcggtcctacgccactgtcactgcgaaacccaacgatattccatttcagcccaaacttgctaactccgttaacctcatcggtcatgtccagtccccgattcagttccatgtctctcccaacgatggctacgtctgggcctccaccgttatcacgcgtcaagactcctctgacctctctttctcgattccggttatatttgagggtgatctcgctcatactgccaaatttcatctcaatctaaatgattgcatccacattgctggaaaactcaccactgattcaccccaattggaacacctccacccccaatctaatattcaggttatggtacaaaccctcaattttgttcaacgatatccccaacccaacaccaccacatcaattgatttgaaacctcaacctcaacctcaaccagaacactccatacccagtgcaaagaaaaacccggattcttcttcaccgagtccctggagagaccttctagataatcccatgcagtggcgtgatttccgtgaaagcaaacgcaatggattggtaaaaccaaagcaccctgatttcaaacgcaaggatggctattctctctggcttggcaaggatgaaaagtgggttttgcctaaattggaagaacttccatttngatgttccctctgctatatccaaaaaagtacacatgtctcaggtgatggtggtgagtcctggaatgatttggtgcaaaactatgctaactggtgggataatagattaaataagaggagggcaaaagctcccgatttcaagcacaaagaaaccggtaaagggttgtggcttgattcttcatcagagtgggtgttagaaaaattgccgccacctctgaagcctaaacaaagtgtagatactgaaaggacactggtttcataagcaatggacagtgaagcagaaaatggagtcattctctgtgttacacttccatgtaattaacttatgccttcccaagttctgtttttgtgatattttttttttataaaactaagcatttcaaccattcggctactaagcatttgacttgcagtctttacctaggcggatatagatatattagctagctgcttctgatgtgaaaatgcatttatcatcagacagaatttctgctacttctgtacatccttattccgcatatgaggggaagtgtttttgctcaattgatggtggatttcatgttcctc

SEQ ID NO: 7936 - DNA, 1996 bp, Glycine max
gcgcccacgcgtccgcccacgcgttcggactataacaacagccaagcgcattggcctatatatatcaacacaaaaactctttgattcagaaacatacatatatattcacacaaatatccatttatatatacatatatatagttctatatggcaatgacaacggtggtgtttgtcttgtgcatctttgtagtgttgaatgcaagtgcctctgatgccactcgcttattgctgaacaaaactgcaacaggtaacgtgtccagagagaagattgagagatacttacttgaaaatggactcggccagacaccccccatgggatggaatagctggaaccactttggctgtgatattaatgaaagtttaattcgagaaacagctgatgcattggtgtcatcgggccttgctgctttgggatacaaatacattaatttagatgattgttgggccgaacttaatcgagaccatcagggaaatatggttcccaaggcttcaacatttccttcaggaattaaggctctggctcattatgttcatgggaaaggtttgaagttggggatatattcagatgcaggaaatcaaacttgcagtaaacgtatgcctggatcactaggacacgaagaacaagatgcaaaaacatttgcttcttggggagttgactacttgaagtatgataattgtgaaaataatggtatattagccacagaaaggtatccaccaatgagtgaagctttgttaaaaactggaaggccaatcttcttctctatgtgtgaatggggatggcaagacccagcaacttgggccaaaactgtgggaaatagttggagaacaacaggggatattgaagataactggaatagtatgacttccatagcagatgcaaatgacagatgggcatcttatgctggaccgggaggatggaatgatcctgatatgctggaagttggaaatggagggatgaccacagaagaatatcgtgcccatttcagcatatgggctttagctaaggctcctttattggttggttgtgatattcaagcaatggataataccacatatgaactgataagcaaccgagaagttgttgcagtaaatcaagacaaacttggaatacagggaaagaaggtgaaaaacaataatggtttggaggtgtggacaggtcctcttcgtggtaacaaggtagcagtgatcttatggaacagaagttcatcaaatgcaacagtgactgcatgttggtctgacattggcttggaaccaggaactatagttgatgcaagagatttatgggagcactcaacgcaaacatcggtttcaggaaaaatatctgctgaactagattcacatgcttgtaagatgtatgtcctgactcccagaaggtattaatttcgagtggcagagaagaagataaacacacaactatattggcaaaccatttaaagctgcaggaaccacaaataaagcaaacagattattttttttcaattagaaagacaagtataatgtataagactataagttatacttaatgtataagtctttgaccttccggttgtatttgcaatttggttgcactgaggaccactttattttaaggaaataagtttttcatgtttcgaaaccctctaaatcagttaaattcatgatgctgaaatgaaagcacatcaaacacatgcatttttttttcttctaaaaatagacaagtaacatcaagattttatactgtctctacaaaatgaacgtttgaaatccaaaactacaccatttaaacgtaaattctgcttgtcgtaggaggtgataacacttccaaatgaagtacgcgtacaggattgaagattgatgtaacttttgcaccattcagttacaaaatttgcaattttattggactcacttgcatgccaaaagaaacattattaacacaatgacataaaaaatcaggacacttggaaaaattaaggccgcattctataatggaaaaatcacagatttcgggtgttttaat

SEQ ID NO: 7937 - DNA, 1449 bp, Glycine max
acgtacggctcagctacgtaggcccccccccatgagtctcataaaaccattcacaagacaataacactttttgtccgttcaagcttgcgctttttagcttttatccattgaatagcaatagacccttttgttgcccttttgtttctgaggccttcaaacattcttggcttctttgcaaagttggaattttcactcttcaacttattgttttgatcccaaatcagaaaaaaataatattgggttttattttgatccataagctgaaaggctgaggcaagtatcattggagatacccttttcatctcatgatctgaggttgataaacaagatccttttgttcagagttcagagtgatcatggcatgttccatgaacagtgttttctgtgttcctgaattaaatgagagcatatttggttccaaaaccaaaggggttttgttgccttgtccctcaaaaactgccaatgcaaaatcatggggttgttctgttttgagcaatgctttcatgggaaaatccattgctcttggtgagaaaggctcaggatgttgcaattcaaaattctccagcaatgttcctgttcatgcacaagcaacaatttgtgtcagcaaggctttgaagtggtggaagaagaccctaaagcctaatatgattgagatccactcggcacaagaactggtccattccttgctcaacgctggtgattcattggttgtggttgatttctattcacctggttgtggaggctgcaaagcccttcatcctaagatctgtcaaatagctgaattgcacccaaatgcaatctttcttaaagtcaactacgaggaactgaaaaccatgtgtcacggtttgcgaattcacgtgttacccttcttcagattctatagaggtgcggagggtcgagtttctagcttcagctgtaccaatgccactatcaagaaatttaaggatgctttgacaaagcatgggaatgaacggtgtagtttaggtccagcaaaaggtttggaagaatccgagttgaaaattttggcttctattggtgaaattaattcttctccgttactaagtcccaagcaagggaaattggaagatttgcttacggagagccatgattttgctggggtttggaacatggaaaataatagcaggggacttatgctggatgctatatactagtatttatttaattttcaaactagcaagtagggaatttatttatttatttactttgtcatgttacagaatgaagatcataatggagtaaagcagctccatatcatttattttcctatgaggtttactgatttttatatcttgctgtaaatttattttttggaggggtttgatgggacttgtaacatttttttggttggatttgagccctgcaatttagcaagtgttgctggataataatatcttccgtattcaaagaaaaaaaaaaaaaaaaaaaaaa

SEQ ID NO: 7938 - DNA, 1884 bp, Glycine max
cccacgcgtccgtacggctgcgagagacgacagaaggggaccccacgaatttgcaaatctcaaacgaagcccttttctctctctctctcttcaatttcacccttttagcatttgtacattcctttcccttccttgaatcgttcttaattgcgagaggggatatcggagaagttgattggcctcccattaattgcaggtctgaatgatctgatggagtctaaagttgggaagaagaagtcgtctagtagtaagtcccttttgtacgaagctcctctcgattacaccattgaagacgttcgaccacacggtggaattaagaagttcagatctgctgcttactccaactgcatccgcaagccatcctgagattccctaggttgtgtgacgacatagcccccgtagtcttgcatctgctatattattctagtctcttcttttcccttttcttgttctcttccttgcccttttgttctctctacctatacagcaagactttgtttctttttgagtcaagatggctggctcagctattggtttcgaaggctacgaaaaaagacttgagatatcattttttgaaaatggtgtgtttgctgaccccggaggattaggcctccgagcattgtccaaagaccaattggacgagattcttaaaccagcagagtgcactattgttgcatcactttcaaatgattatgttgactcttatgttctgtcagagtcaagcctgttcgtctatccttataaaattatcatcaaaacttgtgggactaccaaattgcttctgtccatccctgtcattctcaagttggctgatgctcttgacatagctgtgaaatctgtgaggtacactcgtggaagcttcattttccctggggcacagtcttttcctcaccgcagtttttccgaggaggtttctgttcttgacagctatttcagcaaccttggttctggtagcaaagcatatgttatgggtgacccttcaaagtcacagatttggcacatctactctgcaagtgcacagaccaaaggatcatctgaagctgtctatggcctagagatgtgcatgaccggtttagacaaggaaagtgcttctgtgtttttcaaggagaatacatcttcagcagcttcaatgaccgaaaattctggaattaggaagatccttccacagtctgatatatctgattttgaatttgacccttgcggatattcaatgaatggaatagaagggagtgctatatccaccatccatgtcactcctgaagatggtttcagttacgcaagttttgaagctgttggttatgactttaatgacatggctctaggtgaacttgtggaaaggattttagcttgcttttgtccagcagagttttctgttgctttgcacattgacatgcatggtgagaaacttaataaatttcccttagacatcaaaggatactactgtggtgagaggagcactgaagagcttggagtaggtggtgcagttgtgtaccaaacatttgttcaaggctgcgatggtagtgcatctcctaggtctattctgaaatgctgctggagtgaggacgagaacgaagatgaagtgagggagatataagtacttctggtttttatgttctgttgttatttatctttactgtcgagtgtgttattacctaaataaataaatatgggggttatgatgtgagtgaagcaatgaacttgttgtgtagcttcacttcacttgtgtgattatgcagatgttatttcgtttctactgccaactcatatgggaaactcttatatgaggctgttgcacttgtatttcattttatataaataaatatgaatataattatattataatgtaaaagttattagtgacaaatgctggcggtgatatttctt

SEQ ID NO: 7939 - DNA, 1614 bp, Glycine max
aggtaagctaggacatcacttttttctataaaggcctgcttctccaggcatttgtacatccttcttacaataagcttggaggaggctgttatcagcgattggagtttcttggagatgctgtcttggattatttgattacttcatatctattctcagcttatcccaaactaaagcctggtcaattgacagatttgagatcattgtctgttaacaacaaggcatttgcttgtctagcggtagatcgcagttttgataattttcttttatgtgattcaagtggcctgtctgaggcaataaaaaagtatgtggactatgttagaagacctgtgtcagataatggcattaaagaagggccaaaatgtcccaaggcactgggtgacttagtggaatcttgtgttggtgccatccttcttgattcagggttcaatttgaacaaagtttggaagattatgacttcgttcttggactcaatcatgaaattctcatcaagcttgcagctcagtcctgttagggatttgcgagaactttgccaatctcataatatggagttggagtttctgccagtgccctcaaaattgactaaaaggttttcagttgaagctaaagtgagtgggaatggtgtatgtgaaacagcttcagcaactggtcaaaataaaaaagaggcttgcagaattgcttcactgctacttttttcaaagttcaaggctcaaggctggaaagcaaagtcaaaaactttggaagaagttctggaatcaacttctaaaatggaaccaaaacttattggctatgatgagactcccattgatgcggcccggaccattccccgcgtcgtccctcgccctcccccatacaacaagtctaacccagaaattcgccctatgcaagagacagatgaaatatgctctccatgtgtgaaacctttcggccaacggcttcaatcttctgctaagggaaagcttagtcaaatatttgaaaatcgtgattgcagcagtgacttgtcagggacaggaacggcaagatcacgattgtatgaattatgtgcttcttattgttggaaacctccttcatttgaatgctgcaaggcagagggacctgaccacctgaaacaattcacttgcaaggtgaccttagagatagaagaggcccagaatttgattttagagtttgttggggaacctctttcaaagaagaaagatgcagcagagagtgcggcagagggtgcattttggtatctacaacatgaaggttacttgcctagtagtggtaattgacatattgtagaacaattatcatgccacataaatcccaaggcaatttggtgtaggcaatgtcttgattattgagggtgtcgaatgtgttgttataggtaatcatataatctagaaggcaataatagtacaggtttagtaactcagggccagggagggttccctaatggtaaatctattgtaaaggtattattcatgtatgtattattgtagtgtcaaagttacatctaacattgtatgtaaaccatccctcgattataacagtgaattttctatttaccacgtttggggagggttccctaatggtaaatctattgtaaaggtattattcatgtatgtattattg

SEQ ID NO: 7940 - DNA, 707 bp, Glycine max
  misc_feature (687)..(688): n is a, c, g, or t
ccacgatttagcaagagagacacgttcttaatttttcttaagaagttatatcaatttggcaacacaatttgattacgcttttgttgtaaaaaaaaaaaacaacaaaagagaggggggagcgatgatgaatggtattggtaacatgaagatgtgcaaatcagagagcgcgttgaaaacgttgttgccggagaaacgaatcaaacgacaagcttcaggggcggaacgtggttgcagtaagggcagcaatggtattgcaacgcaatctaatgtcgatgacaagaggaagatggagaaagctgagaatatcatgcatttgatttgctggggacccacctggtcttagatcttactaaattttatttggggttttattttgtgtagtaatgaggtgtcaggattttataataactcagacacgagctagatccctttacaaatactatttgggtttgtttgttcattttatttttacctttttaataattattttctgttggttggatttcaaattttgcaatttcacgtatgtgtacatacggaagaagctacgtttatgttcttcaacccctgaatcagtttggagctatttgtttagaggcaaggaagaagaatgtttaagtatatttttagtgtatgtaaatatgaggatttttggttttcagtttgtagctatacgtttatatttcnntatccttaactataagtat

SEQ ID NO: 7941 - DNA, 2097 bp, Glycine max
ttgggtaccgggcccccccccacgccgccacctaagccccccccccaaataaaaacgcatgccctcgtctctttttgaaaacactttagtttcgcaaagttgattctttctctctttatctttctttccccaatttgtgagtgttactgttgaatcgattggattggcattaggttgatctgaaatacgcaattgacatggcgagcgcgatggtagaggacgcgaacttcgaagatgaccaactagccaatatgaccaccgacgacatcgtcagagcttctcgtcttctcgacaacgagattcgcatcctcaaggaagagttgcagaggaccaatttggaattggaatcgtacaaggacaagatcaaggagaatcaggagaagattaagctcaataagcagttgccctacctcgttggcaacattgttgagatattggaaatgaacccggaagacgaagctgaagaagatggtgccaatattgatcttgactcacaaaggaagggaaagtgtgttgtgctaaagacttctactcgacagacaatctttctacctgttgttgggcttgttgaccctgacaagttaaaacccggtgatctggttggtgttaacaaggatagttacttaatcttggataccctgccttccgagtatgattctagagttaaggccatggaagttgatgaaaagccaacagaggattacaatgacattggcggattagagaagcagattcaagaattagttgaagccattgttttgcccatgacccacaaggagcggttccaaaagttaggagttcgtcctcccaagggagtgctgttgtatggacctccagggactgggaaaacattgatggctcgtgcctgtgcagcacagacaaatgccacttttctgaaattggctggccctcaactggtccagatgttcattggagatggagcaaaacttgttcgtgacgcctttcaactagcaaaagaaaagtcaccatgcattatttttatagatgaaattgatgcaattggtacaaagcgttttgatagtgaagtaagtggagacagagaggtacaacgaactatgttagaattgcttaatcagcttgatggttttagcagtgatgaccggatcaaggtgatagcagcaactaaccgtgcagatattcttgatcctgccctgatgcgttctggtcgtttggatcgtaaaattgagtttccacacccaagtgaagaagcaagagctcgaattctacagattcattcaaggaagatgaatgttcacccagatgtcaactttgaagaacttgctcggtccacagatgatttcaatggagctcaactgaaggctgtttgtgttgaggctggcatgttggctctacgccgtgatgcaactgaggtgaaccatgaggactttaatgaaggtattattcaagtccaagcaaagaagaaagcaagcctcaattattatgcataggctggattttggaacaagctatttttcagtttacgaagatctattgagacatatcaagccaatggaaaacctaagtcgatgtttgacatttgttatctatttcttttcttttttttggcaatctaatggtatgataacccacagcatactggaatcatcgtatcttttaaaaacatgcaatctgatcattaatttcgtggtagtaatagaaatttgatctgcttgctatgtttaaaatcttgttgatcaggttatatacgattctctgataaacaaacaagacttgtgatggctgtaatcagaatttgatttattgaatgagttttaaaaggaaaaaagttaagactcccatacccaccaatggctagaaaaagaaaaaagaaagtttcgcagcgaagtgaagcgctcctagcctcttacaaccgtttgcattttgtgtgacgtaactgttaacttctctgcattgaccttcgtaggttgccacaatgcgggctgattatgctagggaacacacccatcggatattcttaaaagcctaaaagacgtagatgatttatcaatcggatattctttaaaaaaaaaagagtaaatttatgctatgtaagtgtatctctgggaacattatcaa

SEQ ID NO: 7942 - DNA, 706 bp, Glycine max
  misc_feature (663)..(663): n is a, c, g, or t
taaaaaccctaagtaaaataaaactctagggttacatacattactaacctgtccgcgttctctctctctctctgtatcttgcgaaatccgttcccctatctgcttttcgagttgttgctaaagagtgatggactcaccgcccagcaatcaccacgcggtcgacggagacgccaacgacgtcgttagatccttttcccaccgcgacgacgatgaagacggcaagccccaacccctcaccggggacggcgccagtcctggaaagatattcatagggggtttagcgagagaaacgacgattgcgcaattcatcaagcactttggtaaatacggtgagataacggattccgtcatcatgaaggaccggaagaccggccagccgcgtggtttcggcttcataacttacgctgatccctccgtggttgatacagtgattgaggacactcacattatcaatggcaagcaggtggagattaagcggacgataccgaggggggctgctggctcgaactcaaaggacttccgaacgaagaagatttttgtgggtggaattccttcgactgttactgaagatgaatttagggacttctttacacgctatggagaagtcaaagatcaccaaataatgcgggaccactctactaatcgttcacgtggatttggctntatcacttatgactctgaagaagctgttgatgatctcttatct

SEQ ID NO: 7943 - DNA, 731 bp, Glycine max
attactaacctgtccgcgttctctctctctctctctctctgttgcaaaatccgttcccctatctttctgcgtttcgagttgttgctaaagagtgatggactcaccgcccagtaatcaccacgccgtcgacggagacgccaacgacctcgttagacccttttcccaccgcgacgacgacggcaaaccccaacccctcaccggcgacggcgccagtcccggaaagatattcatagggggtttagcgagagaaacgacgattgcgcaattcatcaagcactttggtaaatacggtgagataacggattccgttatcatgaaggaccggaagaccgggcagcctcgcggtttcggcttcataacttacgccgatccctctgtggttgatacagtgattgaggacactcacattatcaatggcaagcaggtggagattaagcggacgataccaaggggggctgttggctcgaactcaaaggacttccgaacgaagaagatttttgtgggtggaattccttctactgtgaccgaagatgaatttagggacttctttacacgctatggagaagtcaaagatcaccaaataatgcgggaccactctactaatcgttcacgtggatttggctttatcacatatgactccgaagaagctgttgatgatctcttatctgtggggaacaaaattgagtttgctggagctcaggtggaaatcaagaaagcagaacccaagaagc

SEQ ID NO: 7944 - DNA, 1862 bp, Glycine max
catgcatctagaggtatatgaataagtctcactgtctttcttggtctgctgtcggtgtttgtgacatcgaaatttcgttcaccagttttgggttgaattttgcatacccctcgagtatttttcagtttcccagaaaaattattggtgtgaatgcatctagagctagagacttggacaattttggttgctattgtgtgcatcttggtctttgttctgaaggagattgttatgggagggaagagctcaaaagggagtggtaggaggtatgattttggtgcttcttcatcttcacgggataataactatggtggataccatccacaatcaccatacccttcttatcaaacacctcagcacccgcgtgcatcagctccattttatgactatggacagccaaaaaggaagttggataagaagtattccaggatagctgataattaccgttctttggatgaggttacagctgcacttgcaaatgctgggctggaatcttctaatctcattgttggcattgatttcaccaagagcaatgagtggacagggaagaggtcattcaatcgaaaaagtttacatgacattagaagtggtcaaaacccttatgaacaagcaatttctattatcgggaaaactttatctgctttcgatgaagataacttgattccttgttttggatttggagatgcatctacacacgatcaagatgtatttagtttctattcagaagagaggttctgcaatgggtttgaggaagttctgacacgatacagacaaattattccttccctaaaactcgcaggacccacttcgtttgcccctattattgaaatggctatgactattgttgagcaaagtggtggccaatatcatgtcttgctaataattgcagatggacaggtgactagaagcgttgatacacaaaatggcaacttaagtccgcaagagctgaacacaatagatgcaatagtaaaagccagtgagtatccactgtcaatagttttggtgggagttggagatggaccatgggaaatgatgagggaatttgatgataacatcccttctcgggcatttgacaattttcagtttgtgaattttactgaaataatgacaaggaatgtagattcaaccagaaaagagacagattttgccctttcagctttgatggagataccttctcaatacaaggcaaccctagagcttggcatattgggttcacggagggggcattcaccagatagggttgctctacccccacctctttatagtagaacctcttccagcatcagcacaaaatctacaaggtctaacagttttcagcagaggacacctacacatactagctatgatagcagtgttcacacagagacatcatcaagttctttatatgataataaggtttgccccatttgtcttaccaatgcaaaggatatggcctttggttgtgggcatcagacttgttgcgagtgtggagaggacctccaattctgtcccatttgccggagcacaatccatactagaataaggctttactagttagctttgatgcagaagtcctgtcaatgaaaatttcgtcatttccagaataaggggctgcaaaaggatgtgcagagttggtctggctcttttcacagatggtttcttgtccataaaaactgcatttgcaatttccaggcgaaacttgtattcccagttacacttaggaagagctctttacagaaagaattggccttccccgttgtatatatgtagttcatgtgtctcggaaggcgtcatgtttttaaatgaactgcttgcattaaaattatttgtattgttctaaagagcatttatcattttgatcgaatctagattgtctttctaccaaa

SEQ ID NO: 7945 - DNA, 2336 bp, Glycine max
ttttttctttctttttttctttttaattaccatataaacgaactcgtcatttaatcaagagtcaaacaagaatgtaagatttcacacaagtattacactaaaatataatatcctgccaaataaagttttaagtagagttgcatctacatacattgtacaaggatggccattaaggataacaaatacgtaaataatattgcacagtttagctaatacaaagaaccagtccctagaggaaatctcggtcattcagtctatgaacgcatccttacattgcctatcaagttttattgagttgcaagttaatgaaccttagcttgttccaaagtccaaattctcccacctgaagggtcggaacatacatataacttcgggggagcttttaaacagaagggccacacagacacagacagcggctattgccaccattgagagcattgcaggtctgtataccaaagacctgcctactgcagttctgcaagaaattctcttgtcacaaagcttacagtgcccttggccacgtattacttcagcctttccaatctcaaaggtagtggataactcattttgcttctcgtttgtattgctctccgtcgtattgcttggaatctcaaccaccacatgagctgctccttgtctcttattaatttttttctgcactaagtgaatgtaagcataatggccacgtaaacgggcataatcctcaggtgtcgagcctgtgctgtcacgagcatttttccatgcttcaattcccaccatgcaaggatcattagtcaaagcatcaagtacatcctcagaaccatctttcccggctgctatatggagtggtgtcaaaccagcaggaccaacaacatcaggtctaaacaagaaggtctgattctcgccatcaaccagtgccttgtcttcaggtcctagtttatcagaaatattctcaggaacatatctcaaaagacactccactaactgcttgctgtttctccttacagctttgtgaaggagacccatctctgaaagcgcgagatacaaggaaggatgatctcctgtatttacagttccatcaagcagtaggttcaacagttttctcactgctgcacaccaatcatgatccatggaaaactcaataagccacttgaaccgtttcaatggaaagagatcctcactagagttcaattgaaccatccttaatttcaactggcttctgtgaagaagccaacccatttcatgaataaaatccatggcttgatttttggctttaatttttccagtcccttcaatatctggatcagtttcacttaattctagaagaggctcaagtgtacagatttctgagcaaacatcctcctccacaacaatgaaaggaaaaaagctgctactcaaaccctggtcctcaatctcaataaatcctcttccattcatcacagggacagagcatgaaaactggacacactgaagttcatcaggctctttggagctttgatccattgacatatgagcatcttcacagaccagatatttcccttctaaagcacacattaacctagtggcagggcgtatcaggttgacacccttaacagaaaattgagctctctttgatgctggtgcagcaattggactaacagtcaaaatcttgctataattattacttctgaaaggtaaggaggtatctatgacaacttgaccattaaaaatgaaggccatctgatgctgcaccctgatgtgaacccatccgtttctccaaaaagtatcatctgagacatccaacagcctattcaaactggaagtcagatcatagcaaagttcctcccacaaagcctcagcctgacgcagataaatggtcaaaacaatacaaccaggccgtatgtagctctccatatcagtaggactgtgagataaccagtcaagaatctgtgctctaagtacaagaggaaaatcatttggctctttaccgaagagcttaaaaacaattcgatctgtgcgactctgaatgatggaaacaaaaaattaaccgttaaatgacaacaatctcaatactaaattaaatgtaaaaaggcattgttcaacaacgtaggtaagaaaaagggaaataatcatcaatatatattaatttaatttttttgtgttttcccactagagattttgttttgggccaggaggggggaatgataagacagtttaataaaacacaggaaggagcaaatagctaaatacaagagtcaagaaatttcatatgttttcacttcttatagccataccaccaaactggcacaagacagaaccaaaaatctaagaaccaagaccatacactacctttggggggggggggcctacgtagctga

SEQ ID NO: 7946 - DNA, 2164 bp, Glycine max
ctctgcacacccctctcatggcatcttcttctggtagtttagacacctctgcaagtgcaaactccttcaccaacttcaccttctccacacaccctttcatgaccacttctttctctgaccttcttgcttctcccacagacaacaacaaaccaccacatggtggtggtggtggtttgtctgagagaactggctctggtgtccccaaattcaagtccacaccaccaccttctctgcctctctctccccctcccatttctccttcttcctacttttctattcctcctggtttgagccctgctgagcttcttgactcacctgttctccttaactcttccaacattctgccatctccaacaactggagcatttgttgctcggagcttcaattggaagagcagttccggggggaaccagcgaattgtcaaagaagaagacaaaggcttctcaaatttctcctttcaaacccaacaaggacctcctgcttcatccacagcaacatatcagtcttcaaatgtcacagttcaaacacaacagccatggagttatcaggagaccacaaagcaggataatttttcttcaggaaagagcatgatgaaaactgaaaaatcttcatccatgcaaagtttttcccctgagattgctagtgtccaaaataatcatagcaatgggtttcaatcggattatggcaattaccccccacaatctcagaccttaagcagaaggtcagatgatgggtacaattggaggaaatatggccaaaaacaagtgaagggaagtgaaaatccaagaagttattacaaatgcacataccccaactgccctacaaagaagaaggttgagaggtctttagatggacaaattactgagatcgtttataagggtactcataaccatcctaagcctcaaaatactaggagaaactcatcaaactcctcttctcttgcaatccctcattcaaattccatcaggactgaaatcccagatcaatcctatgccacacatggaagtggacaaatggattcagctgccaccccagaaaactcatcaatatcaattggagatgatgattttgagcagagttcccaaaagtgtaaatcaggaggggatgaatatgatgaagatgaacctgatgccaaaagatggaaaattgaaggtgaaaatgagggtatgtcagcccctggaagtagaacagtgagagaacctagagttgtagttcagacaaccagtgacattgatatcctagatgatgggtatagatggagaaaatacgggcagaaagtagtgaagggcaatccaaatccaaggagttactacaagtgtacacacccaggatgtccagtgaggaagcatgtggaaagagcttcacatgacctaagggctgtgatcacaacctatgaggggaagcacaaccatgatgttcctgcagctcgtggcagtggcagccattctgttaacagaccaatgccaaacaatgcttcaaaccctaccaacactgcagccactgccataagtcccttgcaagtgatccaacacagtgacaattcccatcagaaccaaagatctcaagcaccaccagaggggcaatcacccttcaccctagagatgctacaaagtccaggaagttttggattctcagggtttgggaatccaatgcaatcttacatgaatcagcagcaacaacaactatctgacaatgttttctcttccagagccaaggaggagcctagagatgacatgttccttgagtctctactatgctgaaggaatttctttttggtagctatggaaggttggaaattttggaagggggggactaggatttattggacaaataaggttcattccatttattgcattttttggtttgtttttgttgtaaattttatacagccacacaggattggtatagtatatatttcataactgttgtatgtttttacacatggtgttggtgaaattttttgattactttggggtttctcttttagttgggaggagaaccttatgttaatcttttgtaagattctgttaattttttcctgtcttcacaattgttcactatcaaaatagtaaagtttcacaagaaatgtgaattatttttgctaaacatgataaaaaaaaaaaaaaaaaaaaaaaaaaaaaaaaaaaaaaaaaaaaaaaaaaaa

SEQ ID NO: 7947 - DNA, 1151 bp, Glycine max
gatgattttgagcagagttcccaggggtgtttattaggagggggtgagtattacgaagatgaacctgatggccccagggggaaccttgagggtgatatccagggtatgtcagcccctggaagtagaacagtgagagaacctagagttgtagttcagacaaccagtgacattgatatccttgatgatggctataggtggagaaaatacgggcagaaagtagtgaagggcaatccaaatccaaggagttactacaagtgcacacacccaggatgtccagtgaggaagcacgtggaaagagcctcacatgacctaagggctgtgatcacaacttatgagggaaagcacaaccatgatgttcctgcagcccgtggcagtggcagccattctgttaacagaccaatgccaaacaatgcttcaaaccacaccaacactgcagccacttccgtaaggctcttgccagtgatccaccaaagtgacaattcccttcagaaccaaagatcacaagcaccaccagaagggcaatcacccttcaccctagagatgctacaaagtccaggaagttttggattctcagggtttgggaatccaatgcaatcttacgtgaaccagcagcaactatctgacaatgttttctcctccaggaccaaggaggagcctagagatgacatgttccttgagtctctactatgctgaaggaattttttttttccctttttggtagctatggaaggttggaaattttggaagtgggggactaggatttattggacaaataaggttccattcgatttattgcattttttggtttgttttgttgtaaattttatacagccacaggattggtatagtatatactagtatttcataactgttgtatgcttttacacatggtgttggtgaaatttttttattactttggggtttctcttttagttgggaggagaacctcatattaatcttttgtaagattctgttgatttttttcctgtcttcacaattgttcactaccaaaatagtattgtttcataagaaatgtgattttttttgttaaaaaaaaaaaaaaaaaaaaaaaaaaaaaaaaaaaaaaaaaaaaaaaaaaaaaaaaaaaaaaaaaaaaaaaaaaaaaaaaaaaaaaaaaaaaaaaaaaaaaa

SEQ ID NO: 7948 - DNA, 1497 bp, Glycine max
tcagctacgtaggcccccccccccccccatctttcattgctccttaactcttccaaatgataccatcactgtctcatcttcttctcataaccctctttctccatggctcttgctggctctgtggttgagcttcaagcctcttcagtaaagaagaaaactgcagtttccagaagttggattctgctggaccactatggcaaaggcactgttcttgatgcggataagtatgctatcatgcgcctggttcaaattcacgccagagatcttcggattctcgaccctctcttatcgtatccttccaccattttgggcagagagaaagtcattgttctcaatttagagcacattaaagctatcatcactgcagatgaggtgttgctaagagacccaacggatgatgacgttgttccaattgttgaggaacttcgacgacggttacccaaagtaagtgctgctgagcaaggccaaggagaagaagaggcgtgtgctcaagatggtgaaggtggagaagaaaatgaatttccatttgagatacgagctttggaagttttatttgaggcaatttgtagtttccttgatgcacgaacgagagagctagagacttctgcttatccagctttggacgaactgacctctaagtagtcgtaattttggatagagtgcggaaattgaaatgtgcaatgaccaggttgacaattcgagttcaaaagattagggatgaactagaaaacctacttgatgacgacgacgacatggctgatctttacttatcaagaaaattggctgcttcatcctctccaactagtagctctgatgctccatactggctttatgggtctccaaatacaggttcaaaacgacacaaatcaagcagagcaagtggaacaacagttcaaagggagaatgatgttgaggagctcgaaatgttacttgaggcctatttcatgcaaattgacggcacattaaataaattggccacattgcgagaatatatcgatgacacagaagattacatcaacatacagcttgacaatcaccgaaatcaactgattcagctagagctcttcattagtgccgggactgtctgtatgtccttatattcattggtggctgcaatatttggtatgaacataccatatacatggaaagcaccaggccatgaacatgtgtttaaatgggtggtgatctttggcggaatggtttgtgcatccttgtttttatccatagtatcgtatgcccgacgcaaaggccttgttgggtcttgaaaaatgaaaagaataaagcatgcatgtcgggagacatcaggttaagtcgaaagtaggcaatttcgacacactgcctcaaaacaatactatagtaatttgcttttatcttttttctatatggagagtcaaatatagtaccagaactttataacattcacttattctattcaatcatgagctagactttctttataatattcttttatcttgtaactaactaattaactcgcaa

SEQ ID NO: 7949 - DNA, 859 bp, Glycine max
  misc_feature (17)..(17): n is a, c, g, or t
ctactccaagatagaanccaggtttttttcaaaattcgggaaccaagcttcttacaagtggcccacaccatggagcgtaagaacttcgacgacgatgaaatcgtgctttgctgacaagtgtcgtgaaagttagagtgatccaattgtgaggtacgaactcctttctccgatgattcctcagcggaagatctgaaaaggaagaaggagagaaagagcaaacacgaagaagaagcacgtcgaaaccctacccgccattgttcctctgaaactcgtgccgaattcggctcgtgcgtgttttttttttttttttttacataatactaacatgtttttgcacaaatattattaattgaaccacggtggtaacaagttgacagcataacagaaatttgaatgaagacaggcaaacatggagaggtttgataggtctagagtacttaaaagcaagcaagcctttgcgaattaaggaaaaaaaaaacatggtttgtagcctcataatatcaaggtctaacttgacgaattattacaaaagactctccatactctctcacatgaacttcctgtacggccgaccattatcttcatcttgcatatggaattcacggacgatgcccttgtagacgaggacgggaatagcgatgccgaagatgccaacaagagcaaggttgcggcgagtccaacggaaattgaactccagattctctctggcagtgccccaatcctctatgaacttgttcttgtttgcttccattcctccccccatcttctcttttcagatccaaatcccttctcttctcttctcttcacttcttcgtctccgcctctcctcccccttctgtcgtctttagcagccggacga

SEQ ID NO: 7950 - DNA, 862 bp, Glycine max
gtattataataagtttcagaatatgagtagatatatttattcgtggtcaaaagtttcgctactacgccctgcctctcccatctaatagcaggattccctaatccagccatctcgaaatgtccgacccggaaaacacacccgcgccccaatcggagcaagactcctcttcgccaccgcccgcccaagaccaacccgtcgccgctgacgccaagctcggccccgccggcgtctccttcagcatatggccccccactcagcgcacgcgcgacgccgtcatcactcgcctcatcgaaaccctatcctccccctccgtcctctccaaacgttacgggacaatgtcccccgacgaggcctccactgccgcccgccagatcgaggaccaggccttttccgtcgccgccagctccgccgcctccgacaacgacgggatcgagatcctccaggtctattccaaggagattagcaaacggatgctcgacaccgtcaaggccaaatccaccaccgcttccgccgccgtcgatatcgggactcctgcctccgatgctgctcctgcccccgccgcagatggcgactccgccgctggcgccgagtccgaaacctgatcattcgggattatagtatattaaattagggttcccttttgagggtttatattttaatattatgatgttccatttgtataactttgtttatttctcgtgctgccaatcttcattataaattattcccttgaacatcttgttgttttattgcttgcctggaaacattattgcgcgtgtgtaattattgtttgtttgcttgtttttttaagtgaattctcactttagttccttgatgttatatgctaccattgatttagtcg

SEQ ID NO: 7951 - DNA, 2263 bp, Glycine max
ccacgcgtccgcttggatccataacccgcatcgagcgagcgcgaaggttgagatccaagatccaaaccaaacccccacattacataaagcttcagctacgtaggccccccccccagctcctagctagggtttttcgaattcccattcttccttccttccttctgcttttatcgatctccaacgaaaccaaaccatgtcgctcaggccaaatgccagaaccgagattcgccgcaaccgttacaaggtcgccgtcgacgccgacgagggccgccggagaagagaggacaacatggtcgagatccgcaagagcaagcgcgaagagagtttgctcaagaagcgtcgtgaaggcctccaagctcagcaacagtttcccgctcctcttcagaactccaccgtcgacaagaagctggagagtcttcctgccatggttgctggagtttggtcggatgataatagtattcaacttgaagccactacgcaatttcgcaagctgctttcgattgaacggagccctccgattgaggaagttattcaagctggtgttgttccacgttttgttgagtttcttgttagagaggatttccctcaacttcagtttgaggctgcgtgggctctcacaaacattgcatctgggacttctgagaacactaaggtggtaattgatcatggggcagttcctatatttgtcaagctacttagttcacctagtgatgatgttcgggagcaggcagtgtgggctttgggaaatgttgctggtgactcccctaggtgtagagatctagtgctcagccaaggtgccctcgtcccactgttggcccagttgaatgagcatgcaaaactttcaatgctgagaaatgccacatggacattatctaacttttgcaggggtaagccacagcctccgtttgagcaggtgagaccggcacttccagcactcgagcgtttggttttttccaatgatgaagaagttttgacagatgcttgctgggcattatcatatctctctgatggcacaaatgacaaaatccaagcagttattgaggcaggtgtatgtgccagattggtgcatgagaagctgcaccaatctccctcagtgctgattcctgctcttcgtacagtgggaaatattgtgactggagatgatatgcagactcagtgtattatcaatcatggtgcactcccctgccttttgaacctgttgacaaataatcataaaaaaagcattaagaaagaagcttgttggactatatcaaacattactgctggaaataaagaacagatacagactgttattgaagctggtctggttgcaccccttgtcaatcttcttcaaaatgcggaatttgacattaaaaaggaagctgcttgggcaatctcaaatgctacatctggtggaattcatgagcagatcaagtacttggtgagtcagggttgcataaagcctctttgtgatcttcttgtttgcccagacccaagaattgttactgtctgtttagaaggcctagagaatattctgaaggttggagaagctgagaagagcctaggtaacactggagatgttaacgagtatgcacagatgatagatgatgctgagggattggagaagattgaaaacctacagagtcatgacaacaatgaaatatatgaaaaggctgttaaaattcttgaaacatattggttggaagaagaagatgagacactaccttcaggagatggtgctcaacctggtttcaatttcggaaacaatgagcttccagtcccatctggtggattcaacttcagctgaagatattttcctgagaagggacttgttggacgaagtagggtttatgccgggtgggcgttgggataaagtctggaggtcagttattgcaccttgtgtccttcgtggttcatgaggtgccggggagggtcagtctacgctaccaagtccaagtaagaagggactggtggattcaacagcagcataatgatcttttcagccgtgtttgttgtacttaaaatacataaagctggtggaaggttgtatatgttgcagtggcagggacacgggtatatggcgaggggtttttttctttaatgcggctttgagtgctgttttttatttgagtcctagttttattggtatgatttattgggtcagtatttgatttgggtaaatatatcatttccaaaccaattttatggtctattccaaattccaatcgaagaattagtgctaaaaaaaaaaaaaaaaaaaaaaaataaaaaaaaaaaaaaaaaa

SEQ ID NO: 7952 - DNA, 605 bp, Glycine max
accaggcctcgccaaacactcgcttcgttctgccaccctttttctcgtgcttccaaattcttccctttcgttgcatcttccttcattaataatcagggtctctcccaaaaatacaaagtataccaagcatcgccctaaaaagctacaacctttactcttttcttcaaagaaagccacatttttttttaattttaattttctgggtcagtgagaaaatggctgattgggcaacggttttgatcggggtagttctgttcgtgctgctccaaccggggctgcttttctcctttcctgggaacgggaagcagcttgagttcggtagcatgaagaccaacggcaaagccattttcatccacacgctcatcttcttcgcgctctactccgtcctcatcctcgccgttaaaatccatatctacaccggctgaaccggttcccgggatctgaggtatcatttcgttattggttactaagcaaagaaaaggaaaaacacaccaccattgctgttactgtaactgcctgttcttctttacttgttctttttgttatctttttatggaaataataataaataacaaaagcaaagaattttcttctttttttttaaa

SEQ ID NO: 7953 - DNA, 1176 bp, Glycine max
aattaagtaaacgtcaccacatcgaagccacaaaaaaaaggttccaataacgccgtggtcgcttatactctgcttctcaaagaacaccaagaaactcccaaattcgtagattgttcgatcgaaccttctcaaaaccctagttccactccgaaatcctctttcttccaaccagatctcaatctcatcatggccaataaagagttcaaggtcccgccggtggctttcccctccgccggcaaccccgccgcggcgggtccaaacctccagcagcggcgcatgcccacgccgccgttccagccgaactccggtatccccttcatgtccttcgacataggctccgccgcggcgtccacctcctcggggccgatctacaccggccccgccgtgggccccggcggctccgccaacttcgacgacgaggaacccctcctcgacgagctcgggatccaccccgaccaaatctggagcaaaatcagatccgttctgaaccctttccgcgtcaaccacactgtccacaaagattcggatctctcgggcccaattcttctctacatgtccttctgcctcttccaattactcgccgggaagatccaattcggcgtcatcttgggctggatcgtggtctcctccatcttcttatacgtcgtcttcaacatgctagccggtcgaaccggtaacctcgatctccacacctgcaccagcgtcgtcggttactgcctcttgccggtcgtcattttctctgccctctcgctcttcttaccggtcgatggggtcattcgcctctcggtcgcctcggttttcgtcttgtgggccaccagggcctccgccggactcgtcgtttcgctcgccgatggcggtgacgaacaccgtggactcattgcgtacgcatctttcttgatttacactctgttttcgttgcttgtcatattctagggtttgtcgttggttctgggatatttggattggatcgctgttcttatggttttacttcttttccttcattttgaaccttgttatttttttggtgcaattatggtatagaaaatggagttattagtttgattccctctttctgtctgaaaagttattccttggttacatttttgttctgatattgaaaggtttttgtaaatcttctagcaattaacgtgtttttatgtgactgtgtggtgctag

SEQ ID NO: 7954 - DNA, 650 bp, Glycine max
  misc_feature (603)..(603): n is a, c, g, or t
cacttgcgacctctcttgaatgtcaatgaatgaatgtatgtataaaactcgcgtccagctccgcaggcctccttgcacgctcgccattggtgatcacttccgatagctcttagaaacatccaatccaatggcagagaacaacaaccaccaccatttcggaaccgccatcagaaggctcgcctctgtgaccaaccacctcacttcttctcacaacgcacccggcgaactcgccctgtgccgcacttccggtaggagcgacagcttccaccgcgtccagggccacgtcccctcccacgacgtcgtttggaggatcatcgcctccgaccacgacaactccggcaaggacttcaccgacattgtctacgagaaggccgtcggggaaggaatagccaagataagtattaataggccagagagaaggaatgcgttccgcccccacacggtgaaggagcttatgcgtgctttcactgatgccagggaagatagctctattggggtcgtcattctcactggcaagggaaccgaggcattttgtagtggtggtgaccaggctttgaggactgacaatggctattctgataatggaagtttcagtagcctcantgtgttagacttgcaggtgcagatacgccgcctccctaaaccagtga

SEQ ID NO: 7955 - DNA, 1890 bp, Glycine max
  misc_feature (1834)..(1835): n is a, c, g, or t
  misc_feature (1842)..(1842): n is a, c, g, or t
  misc_feature (1854)..(1854): n is a, c, g, or t
  misc_feature (1860)..(1861): n is a, c, g, or t
ggctcgagctccggacgcgtgggtttctactctcacagctgtttattttcttcctcttctcaactgtgttcgtgtgtatgcatttgagttgaaagccagactcaaggagctgaaagacaaaagaagaaacttggatttgaatcagccaaaatttgagttacacgtaattgcaaagataagatgagtgttatgtatagtcctgttctcaattactcagatgtggagcatcagctaaggaaaaaccaagacatggattcaagtattggacatccacaacaacactgtcaccaacccaattctggactattgaggtattgttctgctccaagctcattgctggcaagcctcattgacaacaccattcatggctgtgtcaacgaggaatcgttcacaagtgagaatcatcatcatcagcagcagcagcagcagcagcattatcttccatctacaagttcagaaatggagaccatgttatccaaattgctaccatccaacaatggatggagcaattcagaagctttgcaagaatttggaggcaagcctgtgaagcaggaaataggggaatctattccacaagagccaccacaacagaatggttattcttatggtggctctcagttgatttaccaatctcagcaaattcaaggcttgccaaatggtggatcttccagtgcttctggcagtgcttttgatggctcttttggtgtggtgcactccatggcttcagaggactccattcaatctaaaatgggtatcaggaattgctccaatctctttaggcaaaagagttcccctgctgcatttttctccattgaaaatgatcttgcagcattgagagaagtaggaagctttaaagccgatgatgtttcaaatggactagttactgcatcaactggtgggttgcatagttctcatactttctcatctaggccatcttcatgcttgaaacggttgccacaaatagccgaaaatggaaatgaaagcctagaagaaaattgtgaccaaagtagaaacctagtaaatgacaatggtagctcaaaatgttacatacctagcttcaccaatgaattatgggaaagttctgcattcaatgccccaaaaacagagaatgaagatgaaatcatgttttccacttcaaatattttggaatctcaggaagcagatttcagctttcaaaatctgggtttgactcaccatttgagtctacctagctcttctactaagatgtcatccatagaaaagtttcttcagattcaaggttctgttccttgtaaaattcgagccaaaagaggctttgccactcacccaagaagtattgcagagagggtaagaagaacaagaattagtgaaagaatcaagaaactgcaagacctttttccaaaatcagaaaagcaaacaagcacagcagatatgttagatttggcagttgagtatattaaggacctgcagcaaaaagttaagatactctcagattgtaaggcaaagtgcaaatgtacaagtaatgagaagcattacactagaacttgtgcttgatttatttgcatgtagatagcaaaaggatggaagattttttagtgtgccaaagttagcaattgtaattagataaaataatgctgacatttgcctggagtgagtttaggaccaggtgaatttttttttttacttttttttttcattttttcccttaatttctttttcttcatagtttgatttaaggatcataaagacctagcatgtttagcatgagttttgtagctcttcattattacatataagaatttatgttgaaatttatataaaaactaatacagaaccacgaaaaagaaagggcggnnccgtctnctagagagaatnccaagnncttacggtacgcgggtgcagtgcgacgtc

SEQ ID NO: 7956 - DNA, 1221 bp, Glycine max
ctcctcgctgttctcttcaccagagtggttggcattggcaccttgtttggttgcacacttcaattaccttaccattattaaattctcatcatctctctcagctaaatcttcttctccaccatctcttcgcccataacctaattagtgctcaatcacaaaacatcaatttctctatgatcatgatgatgatgatgggttcaaacacaaaaccccttgtgcacctttctcttctaattttggttctcttttcttcttcaaccgaatccctcagattcgaactccaatctgggcacaccaaatgcatctccgaggacatcaagagcaattccatgaccgtgggcaagtaccaaattgttaactccaacgagggtcagcctcttcccgattcccacagagtcaccgtcagggtgacttcgtcttatgggaacaactatcactacggggatcgcgttcagacggggcattttgcgtttgcggcagtggaggctggagattacatgacttgcttttgggctgtggatcacaaccctgtggaaacgttgactgtggattttgattggaaaacgggtgttgcagccaaggattggtctaatgttgctaaaaaaggccaagttgatgtaatggagctagagctaaagaagttgcaggatactgtttcctccattcatgaggagatgttttatcttcgtgaaagagaagaagaaatgcaggaactcaacagaacaaccaacagcagaatgttctggttgagtttgctttcgctctttgtctgtttatccgtagcagggatgcaactatggcacttgaagaccttcttcgagaaaaagaaacttatttaaaattttgtgatagtttttttacatttttcttatgtgctcttgtaacatataccagcattaatttatccaaaggatacgcataacggtagtcagtataatctcagaatatttcctttgttaaacgcaaatcagagttatggcaacacgagtttcagaggaaatgttggcgttcttcagttcaaaaaaaaaaaaaaaattcttgttttaaattttaaataaaaaaccattaagatgtgggaatacttcgggaatcttattggggagtcaaatattctaattatgatgattaccttgtagatgattatgcaacacaacatatattcccccctcaaatcaaatcagaggggtgagtgaatagatttccaaaggatggatttaacca

SEQ ID NO: 7957 - DNA, 1142 bp, Glycine max
ggaaagttttatgttattggtggaattggtggaaaagattccctcctgccgacttcggctcgggggtacaatatacaaactagaacatggacagaaattcctaacatgtcccctggacgcagtgccaggggagctgaaatgcctgcaacagctgaggcgccacctctggttgccgttgtaaatgatgaattatatgctgctgattatgctgacatggaggtaaaaaaatacgacaaggagcgaagagtgtgggttaccattgggagactacctgagcgagcagtgtcgatgaatggttggggtcttgcattcagggcgtgcggagatatgcttattgtcatcggtggaccaaggactcatggtgagggttttattgaactcaattcatgggttcccagtgaaggacctccacagtggaatctactcgccagaaaacggtctggcaactttgtctataattgtgctgtgatgggatgttgaagaattgaattgtgaaaggtatcacacattttgatgcttcaaatccaatgagttgcacaacattgattcatccattgacacaggattcttgctaattggtactttcccccttctttttcgatgatattttcctttcaaaggcgggggaggatggggaggagattcagatatttctcaagattggctgaaaagttttccaagaaggaggctcttcggtcttttatttttatgttcaaaatttcagtttccattttgttccattgaaattggtatcttcccccatttacatttacatgaaaattttcaaagcttgctatcatgtagcacaggaataggttaaataattgaagtctcaacactaatgtaggttattggtgttgtttattttaagtttttctttttttcaagaacacacaactagatatttgattttcatgatcataaattttcttagcttgaaggatgggaataatttccgatagttgtttattaattttggattatttagcaatccaattttcatttcaattcaattcttggactatgtattttgagctttccctagcatggagaaagtagtatatagcctgataaacattccatttattacttgttgcaaatctaacttgccaccataatatattttctacttctgtattgtc

SEQ ID NO: 7958 - DNA, 2257 bp, Glycine max
aattcggctcgagggaatgacagaggaaaagaatacctcaaggcgaaaggcccttgccaagtggctgaaggagagcattctgagattaggtcctacatttatcaaagttggtcagcaattctccacaagagtggacattcttccacaagaatatgttgaccagttgtctgaacttcaggatcaagttcctccatttccctcagagactgctatagctattgtcgaagaagaacttggaagtcctttagctggtgtcttcgatcattttgagtatgaaccaatagctgctgcaagtcttggtcaggttcatcgtgcaagattaaggggacaggaggttgttgttaaagtgcaaaggcctggtctcaaagctctttttgacatcgatcttaaaaacctgaggattattgctgaatatcttcaaaaaattgatcccaaatcagatggtgcaaagagggactgggttgctatttatgatgagtgtgcctctgttttatatcaggagattgattacaccaaggaagctgctaatgcagaactatttgcaagtaactttaaaaacttggattatgtgaaagtccctacaatcatctgggattataccacgccacagattctgacaatggagtatgttcctgggattaaaataaataaaatacaagctttagatcaactgggtcttgaccgcaaaaggttagggcgatatgcagttgagtcttacttggagcagattttatcacatggtttcttccatgctgaccctcatcctggaaatattgcagttgatgatgtcaatggtggaagattgatcttttatgattttggaatgatgggaagtatcagtcaaaatatccgagaaggtttacttgaagctttttatggaatttatgagaagaatccagataaggtccttcaatcaatgattcaaatgggtgttcttgtcccaactggagatatgactgctgttaaacgaacagcacagttcttcctcaacagttttgaagagcgtttggctgcacaaaggagagagagagagatggaaacagctgaacttggattcaaacagccattaagcaaagaggaacaagtaatgaagaagaaagaacgtctggctgctattggtgaggatttattagccattgcagcagaccagccctttcggtttcctgctacattcacatttgttgttagagccttctcagtattggatggcattggaaagggccttgatcctcctttttgatattactgagattgccaaaccttatgctctggagttgctaagattccgtgaggcaggagttgaagttatcctaaaggacttgagaaagagatgggacagacaatctcaagcattttacaatttatttagacaggctgatagggttgaaaagcttgctgaaatcattgaaagattggagcaaggtgatttaaagctccgagtacgaactttggaatctgagagggcattccagcgtattgccactgtccagcggacaataggaaatgcaatagctgctgggagcctaataaatcttgcaacaattctgtttcttaactcgattagggtgcctgccactatagcatatgtcttctgtgcaatctttggttttcaagttctctttggcattgtgaagatcaaaaagctagatgaacgggaaaggttgattacagggactgcataagcaactaaagatttagggtggacatgttgcttatgttaaggtcatggttacaagtcaacctccggggcaccaaaatgattaggagctcaaagtaagagctaacatcttggaatatatcagcatgtgctaaatctttatactggcaggcatgctggaggcttctgttctcatttacttccctaaaatcatcgagctgaggtagccaactggcgagccacatttttgtcattaacacgatcccccttgcgtcttcattgcaaaattttatcatcaaataacatgtattagtgcttttttgtacctcatccatgttgtaaattttataggcattggtgtagattgtagtgtttattggtgtaatcacatatagtatggtgcagcttccaatatagtttgacaacgggaagctttgcttgtaattgacatacataaatttattcaatgaaaatgcaaatataagtattttctataagtaaaaaaaaaaaaaaaaaaactcgagactagttctcttcctttgcaattgttaccaaacaattcttgcttagcccttacaagcaagcattaacaacaatgaa

SEQ ID NO: 7959 - DNA, 2804 bp, Glycine max
  misc_feature (189)..(190): n is a, c, g, or t
  misc_feature (193)..(193): n is a, c, g, or t
acccgaactccatttcctttctccgcaaatcacccccaaacgccgtatttccctctccaaactcccctccatttcccgccacgtcacctccaacgtttctctccgcaccgcgcgaatccgcgcaagcagagaagaatccgcgttggccgaccgagtcaacgacgtcgaatggaccggaaatggcgccgnncgncgctgcttccaacgccaatggtgcctccgttagtgggtacgtcaacggcgccactaacggtagcttggtcaagtacggttacgaagacggaaacgacgttgctgctgcggaggtggtggaagttgaagcctctaacaagctgagcgaggatgggaggaagaagaggttggaggagattgggaaagaagacgcgtggttcaaacaaaccgggaacgaacaagtggcagttgcacctgggggtcgttggaacaggttcaagacttactccacaatacaaagaacctttgagatttggggatttgttgccacgttcatctttaaggcttggctgaacaaccagaagttctcttacaaaggaggaatgaccgaggaaaaaaaaaccttaaggcgaaaggcccttgccaagtggctgaaggaaaacattctgagattaggtcctacattcatcaaaattggccagcagttctccactagagtggacattcttcctcaagaatatgttgaccagttgtccgaacttcaggatcaagttcctccatttccctcagagacctctgtagctattgttgaagaagagctgggagctcctttaggtgatatctttgatcagtttgactatgaaccaatagctgctgcaagtcttggtcaggttcatcgtgcgagattaaatggacaggaggttgttattaaagtacaaaggcctggtctcaaggatctttttgatattgatcttaaaaacctgagggttattgctgaatatcttcaaaaaatcgatccaaaatcagatggcgcaaagagggattgggttgctatttatgatgaatgtgcctctgtcttatatcaggagattgattacaccaaggaggctgctaatgcagaattgtttgcaagtaactttaagaacatggattatgtgaaagttcctacaatctactgggattataccacaccacagattctgtacaatggagtatgttccagggattaaaataaacaaaatacaagctttagatcaactgggtgttgaccgcaaaaggttagggagatatgcggttgagtcatacttggaacaaattttatcacatggtttcttccatgctgaccctcatcctggaaatattgcagttgatgatgtcaatggtggaagattgatcttctatgattttggaatgatggggagtatcagtccaaacattcgagaaggtttgcttgaaacattttatggagtttatgagaaagatccagacaaggttctacaagcaatgattcaaatgggagttcttgtccctactggagatatgactgctgttagaagaacagcacaattcttccttaacagttttgaagagcgcctggctgcacaaaggcaagagagagaggaagcaacaactgaacttggattcaaaaaaccattaagcaaggaggaaaaaataaagaagaaaaagcaacgtctggctgctattggtgaagatttattatctattgcagcagaccagcccttccgatttcctgctacattcacatttgttgttagagccttctcagtgttggatggcattggaaaggggcttgacccacgttttgacatcactgagattgccaaaccttatgccctggagttgctcaggtttcgtgaagctggggttgaagttgtcctaaaggacttcaggaagagatgggatagacaatctcaagcattttacaacttattcagacaggctgatagggttgacaagcttgctgacattatccaaagactggagcaaggtgatctaaagctgcgagttcgaactttggaatctgagagggcattccagcgtgttgctgctgtccagaagactatagggagtgcagtagctgctgggagcctaatcaatcttgcaacagttttgtatctcaattcaattcgggtgcctgccattgcagcatatatcttctgtgcactctttggttttcaagtgctcttgggcattgtcaaggtcaagaagctagatgaacgggaacgattgataacagggactgcataagcagctacatgatttaggattaggaccgaaaaatagctcatgttaaggtcatggttacaagtcaaccttcagagcatgaaaaggattaaatgacctggggagctgaaagaaagcattacccaacatttcggaagacttcagcaagtataaaaatttcaattagcaaatgatgggggctttctccattcacctgtttcagttaataaaaaaattgtgctctacaatagccaattggctttagagccacatttttgtcattacaccccacctccctcccaaaaaaattatatgttattgccccatagtaacatgtataggtatgatgtagagtttggatatattcacaattcactactacattccacgcccgaacttaaccgaaatctgtcaaaattcagctactatttttctatgtagcatgactcttattgtaattactattacagtattatacagtatgatgcagcttccaacaaaaaattggagaggaagctttgcccgaaattgacttccatagatttgttcaatgaaaaaaaaatggttgtatgtgtcaaaaaaaaaaaaaaaaaaaaaaaaaaaaaaaa

SEQ ID NO: 7960 - DNA, 1523 bp, Glycine max
acttggagcagatcatatcgcatggtttctaccatgtcagctacgtaggcccccccccccccgttgatgatgtcaatggtggaagattgatcttttatgattttggaatgatgggaagtatcagtcaaaatatccgagaaggtttacttgaagctttttatggaatttatgagaagaatccagataaggtccttcaatcaatgattcaaatgggtgttcttgtcccaactggagatatgactgctgttaaacgaacagcacagttcttcctcaacagttttgaagagcgtttggctgcacaaaggagagagagagagatggcaacagctgaacttggattcaaacaaccattaagcaaagaggaaaaagtaatgaagaagaaagaacgtctggctgctattggtgaggatttattagccattgcagcagaccagccctttcggtttcctgctacattcacatttgttgtgagggccttctcagtgttggatggcattggaaagggccttgatcctcgttttgatattactgagattgccaaaccttatgctctggagttgctaagattccgtgaggcaggagttgaagttatcctaaaggacttcagaaagagatgggacagacaatctcaagcattttacaatttatttagacaggctgatagggttgaaaagcttgctgaaatcatccaaagattggagcaaggcgatctaaagctccgagtccgaactctggaatctgagagggcattccagcgtattgccactgtccagaagacaataggaaatgcaatagcttctgggagcctaataaatcttgcaacaattctgtatcttaactcaattagggtgcctgccactatagcatatgttttctgtgcaatatttggttttcaagtgctctttggcattgtgaagatcaaaaagctagatgaacgggaaaggttgattacagggactgcataagcaactacttgatttaggatggacatgctgctcatgttaatgtcatggttacaagtcaaccttcggggcatcaaaatgactaggagctcagagtaagagctagcatcttggaatatatcagcatgtgctaaatctttatactggcaggcatgctggaggcttctgttctcatttacttccctaaaatgattgagctgaggtagccaattggcgagccacatttttgtcattaacacgatcccccatgcgttttcattgctaaattttattatcaaataacatgtattagtgttttattttatttttttacctcatccatattgtaaatttaataggcattggtgtagattgtagcgtttattgttgtaatcaccatatggtatggtgcagcttccaatatagtttgacagcgggaagctttgcttgtaactgacgtacataaatttatccaatgaaaatgcaaatataagtattttctataaaaaaaaaaaaaaaaaaaaaaaaaaaaaaaaaaaaaaactagggggggggccaaaaaaaaaaaaaaaaaaaattggg

SEQ ID NO: 7961 - DNA, 2197 bp, Glycine max
aaaagatgaaaatcatatttttaaaagaaaattaatcatcaattttattgatgaacaccaatctcggcgcgagaaaaaaaagaatagtttgggatgcgaaaagaaaaggttggggtagaagggactgaatccagtggtagatgaggtgaaatgagagcattggtgagagttgagagagagtgagttatgttatcaatgttatggtgaaagtgaaaccacaagcaaagctgaaagagaagctattcagtgattttgattcagatcgtgtctgtgtctacaaccatgtacagcggctccagcgacggcgaaagccatgacgctcctcaaaatcagaggaaaattccgcctgcatcctccatgctatgggtccgcaatcttcgccgtttcatcggatccggcgccggtctcggatccgaagccctgatggagcttgaaactaagagaattttgctcgacatttttaaggaaaagcagaagaaaaccgccgaagctgctacaattcccactttctacaagaagaaacctgaagatggatcaatcagtcatagagttcagagattggcaaagtatcgctttctaaggaaacaatccgatcttttgctgaatgctgatgatttagatgcaatgtggatctgcttaagagagaactgcgtcattgatgatgctactggtgcagaaaagatgaattatgaagacttttgccacattgcctctgtatgtacagaacaaataggtcctaaatgccggcggtttttcagtccttcaaactttatgaagtttgagaaagatgagcagggcaggattgccattctacccttttacctttatgtgatgcgaacggtttcacttacgcaggcaagaattgatatgagtgagcttgatgaggattctgatggtttccttcagccacatgaaatggaggcctatatacgaggtctgatacccaacttggcacagttacgtgacatgccagctgcctttgttcaaatgtattgtcgtattgctgcacacaaattcttcttcttttgcgatcctcatagacgaggaaaagcttgcatcaagaaagttttgcttagtaattgtctccaggaactcatggagcttcaccaggaaagtgaagaagaagtcacggacacagagcaagccgaaaactggttctctttgacttctgctcaacgcatatgtgacatgtttcttgctcttgataaagatacaaatgggacattaagcaagcaggagctgcgagaatatgcagatgcaactctggctgacatttttatcgagagagtatatgatgaacatgttcgtcgtggaaagagtggtggtggaaatgcccgagagatggattttgagagtttcctggactttgttctggctttagaaaacaaagacaccccagaaggcttgacttacttgtttcgatgccttgatcttcaagggaggggttacctcactacagctgatgttcactcccttttcagagatgtacaccataaatggattgagggtggcaactacgaactttgtatcgaagatgtaagggatgaaatctgggatatggttaagccagcagatccactcaagataacattggcagacctactggcctgcaaacagggtggaactgtagccagcatgctcatagatgtacgtggtttctgggctcatgacaatagagaaactcttctccaggaggaagaaccagaagaagaataactctggtcggagacttgctaacataaaactgctgcctcggatacttttcaacttaggattcctcacaagatgtaacacagctcatatgtttgaattattaaatgtggaattagttgtttgttgtcatgttaactgtaaaaacatcataaattagtgtgtatgtagtatagccatgggttcaaagttcgatcgtaaactgtagccaaatgcttatgattggatataaagtaatgatattgctttgttaaaaaaaaaaaagaaaaaaaaaaaaaaaaaataacccttgacttgtctcttattgattggtatgcctaattaaggctataatatcaatgatgccaagtgagacacccatgcatttgaatttggttgttgtagaccatgctttgtgagacccactaatcaacgctaaattgaacatatttggatgttggtgattgtataaaatatacattgcgtcttaggcggactaaaaaaaaaa

SEQ ID NO: 7962 - DNA, 2400 bp, Glycine max
  misc_feature (2307)..(2307): n is a, c, g, or t
  misc_feature (2316)..(2316): n is a, c, g, or t
  misc_feature (2354)..(2354): n is a, c, g, or t
ctcgacccccgctatctaaacactaccctgctgcaccaaagtgccaagtcacacgcacaaccattttcttttctttctctctcactctccaacttgcacccaacccaataataacaataacaaactcaacctcgccaggatccaacacaacgcactccttacacagaccaagattctcccccagtggtgcagttgaagggccgtgaggatgttagagaaagtggaggagtttaacatggataaagttatacaagagtttgaattattgacaagggatgcagaaagagttcagagggaaacactcaagaggattttggaggataacgcatcagcagagtacttgcagagtttgggtctcaatggaagaactgaccctgagagtttcaaggcctgtgttccaatggtcacccacaaagaattggaaccttatatctacagaattattgatggtgatgcttctcctattctcactggaaaacccatcacaaccatgtccttaagttctggcactacccaggggaaaccaaagtatgtaccttggaatgatgaattgtatgaaaccacaatgcagatataccagacctcttttgcctttagaaacaggtattcgacttcttgttttttttgttggaaacataattgttataaattctcccttctgacttgtgcagggagtttcctataaaaaatgggaaggctttaagctttatatacggtagcaaacagttgaaaacaaaggggggtctggcggctagaactgccacaagcaacgtgttctgtagtgctggttacaagtgtgcaatgagggcactccaatcccaatgctgcagcccggatgaagtgatatttggtcctgattttttccaatcactgtactgccatctgctgtgtggtctgattttccgggaggaagttgagtttgtatcttccacatttgcacatagcattgtccatgcttttagaacctttgaacaagtgtgggaagagctgtgcaatgatatcagagaaggggttctcaccagaaatgtcaccgttccttccattcgaatggccatgtctaaactgctcaaaccaaaccctgaattagcaaacgcgatccacaaaaaatgcacgggattgagcaactggtacgggttgataccggagctttttcccaatgcaaagtatatttatggcatcatgaccgggtcgatggaaccttatttgaaaaaaatgagacattatgccggggagctgcctttgttgactgctgactatggatcctctgagggatggatagcagcaaatgtgaacccacaacttcctcccgagtatgccacttatgccgtgcttcctcacattggttactttgaattcattcctctcttagagcttgagaacaccaagcctctgggcctgactcaagtcaaggttggtcaagagtatgaaattgttatgacaaatccagcaggtttataccgttatagattgggggatgtggtgaaggttatgggattccacaattcaactccagaactcaagtttattcgaaggagcagtcttctgctcaacattaacatcgacaagaacactgagaaggatttacaattagccgtggaagctgcagggaagttgctagcagaggagaaactggaagtagttgacttcagtagccaggttgatttatccaaagaaccagggcactatgtcatcttctgggaaatcagcggagacgcgagccaagaactactccatgaatgctgtaactgtttggacaagtctttcgttgatgcaggctacaccagttcgcgcaaagtgaactgcattggtgccctcgaactacgacttgttcggagaggaacattccagaagattcttgatcattacctaggactaggaaccgctgttagtcagtacaagacaccaagatgtgttggtcctacaaacaccagagtgttgcaaatcttgagtgaaaatgttgtcaacaactatctcagtaccgctttcaattgaataaaaatttgggaataacaatctattataaagttcacttagttttaccactttgtgcaactttctagctagcattcttctctttatttaggccattctcaaccctttcttcgagtcattgtccaagtatgtttggctttgcatggtttatttatcacgcagcagattcctctctcatcatatattacgctctctgcaacacctatgtcatgtcgttagtaccaagtattgaaagctgaaggccatggttgtcgggcgtgagggtgaaatatcatgcgaatcctttggactcaagtgtgcagaacaataccaaantaacagaanaatagcttaagatcatctttaatgaagcttgtttatangagtcttaaattaaagtatatttttcctggtagagcaattgagccg

SEQ ID NO: 7963 - DNA, 1273 bp, Glycine max
tttaaaacctacgaagtggagatcctcgtcctcacggaaagcatgatataggagccaacattttttgtgctaagtgcaaaccacgccagaatttcattatttccattaactcccgattcggcttaaattggaacaccaccaattttcgtgggaaccaacaaaacaaaaaaagggtccaattttttgaaaattattaccatcattcatattcatcaacgacccctcttctgtgcccacttccaaatcttctcctctcgctatgggttgcggctcctcccttccagataggggctcaaggcagttgggtcgacccaattcagagaatggtggagggcaggacgccaagaatctgagggtcaagcttgttctcttaggtgattctggtgttggtaaaagctgtattgttctacgatttgttcgtggtcagtttgatccaacatctaaggtaactgttggagcttcttttttgtcgcaaacaatagctctgcaagactctacaacagtcaagtttgaaatatgggatactgctggtcaagagaggtatgctgcgttagcaccgctatattaccgtggtgcagcagttgcagttattgtttatgatataacaagcccagaatctttcagcaaagcacagtactgggttaaggagctacaaaaacatggaagccctgatatagtgatggcactggtcggtaataaagctgatcttcttgagaagcgggaagttgctgtccaggatggcactgactatgcagagaagaatggtatgtttttcatagagacatctgcaaagacagcagataatataaatgaactgtttgaggaaattgccaaaagactgcctcgcccatcagttagttgatgtagccagatagcagttcagtaagggaagggatctgcattagctttggatccttcaaaactatataatgtatggattgtgtttatgtatattgtgattagataatttctatggtctttttatcaacctgtaataataatatcctggaggtcatgtcagatagatgatacgtattaggctatgctttgtgagacccacaaatacgagtcatgtctgttatgatttcatatcccttgacttgtctcttattgattggtatgcctaattaaggctataatatcaatgatgccaagtgagacgcccatgcatttggatttggttgttacagaccatgctttgtgagaaccactaatcaatgctaaattgaacatatttggatgttggtggttttataaatttacattgcgtctt

SEQ ID NO: 7964 - DNA, 1101 bp, Glycine max
  misc_feature (831)..(831): n is a, c, g, or t
acccacttaacccgtcgttgccgcattgatcatacgtacacgtggcagcctaacgttgcttgcctctttctctcgctcttcctttcctccttttttacggctccgccacccacccccacgccgagggaagcacaaccaagcttctctgttaaaaaaaaattaggcgtctaaagggccaaagcttagaaagttgaagctttttttgttgaggtgaaagtgaaatggttggcaaggataatctgagggctgaggacttgaacttgtgctttaagaagcttatgatggtggccgggagtgggaacagtgagaaaggggtgaacttgaaggttggggtgatcaccgagtggaaggatattcctgtggagcttctgatgcaaattctgtcccttgtggatgatcagacggtgatcatagcttctggagtttgtcgtggatggagagatgctatttactttggccttgctcgtttatcactctcatggtgtagcaagaacatgaataacttggtcctatctcttgttcctaaattcgcaaaactgcaaactctaatcctccgtcaagacaagcctcaactagaggataatgctgttgagactattgcaaaatgctgtcatgaactgcagatcctggacctcagcaaaagtttcaagctaactgatcgttcactctatgagctcgcccttggttgtcgcgatcttacaaaactcaacatcagcgggtgttcagcatttagtgacaatgctcttggcttaccttgccagcttctgcagaaaactgaaagttctaaatctttgtggatgggttagagctgcatccgatactgcattacangctattggacaatactgcaatcagctacaatctttgaaccttggatggtgtgataatgttggcgatgtcggagtgactactttagcatatgggtgtcctgatcttaggatagttgacttgcgtggctgcgtccgtataacagatgacaccgtgattgctttcgccactacatgcccccatctgaggtccccaccactgtattattgcatgaacatcccaaatccaccactgtattccttggcacacatcaaagagacccccacgatgtgg

SEQ ID NO: 7965 - DNA, 1615 bp, Glycine max
tcgtcagctacgtaggcccccccccccccgagggaagcacaaccaagcttctctgttagaacaaaaaaaataagaaaaattggcgtcataagggccaaaggtgggaaagttgaagttttttgttgaggtgaaagtgaaatggttggcaaggatagtctgagggctgaggacttgaacttgtgctttgagaaacttatgatggtggctgggagtgggaacggtgagaaaggggtgaactcgaaggttggggtgatcaccgagtggaaggatattcctgtggagcttctgatgcaaattctgtcccttgtggatgatcagacggtgatcatagcttctggagtttgtcgtggatggagagatgctatttactttggccttgctcgtttatcactctcatggtgtagcaagaacatgaataacttggtcctatctcttgttcctaaattcgcaaaactgcaaactctaatcctccgtcaagacaagcctcaactagaggataatgctgttgagactattgcaaaatgctgtcatgaactgcagatcctggacctcagcaaaagtttcaagctaactgatcgttcactctatgagctcgcccttggttgtcgcgatcttacaaaactcaacatcagcgggtgttcagcatttagtgacaatgctctggcttaccttgccagcttctgcagaaaactgaaagttctaaatctttgtggatgtgttagagctgcatccgatactgcattacaggctattggacaatactgcaatcagctacaatctttgaaccttggatggtgtgataatgttggcgatgttggagtgactactttagcatatgggtgtcctgatcttaggatagttgacttgtgtggctgtgtccgtataacagatgacagtgtgattgctttggcgactagatgcccccatctgaggtccctaggactgtactactgcaagaacatcacagatagagcaatgtattccttggcacacagcaaggtgaacaacaggatgtggggaactgtgaaaggaggaggaaatgatgaagatggtttaaggactttgaacattagccaatgcactgcactcaccccatctgctgttcaagctgtttgtgactcattcccttctctccacacatgctcagggaggcactcactcatcatgagtggctgcctcaacttgacatcagtgcattgtgcctgtgctgtccatgcgcaccgtgcattcaccactttccctcatcctgctcattaagaagctcatgctttgatgttgaacacacttcgaggatgtgccctttcaagggctcagagaagtgaaaaagtgaaatccctccctggtagatatatgcctgcaaatagagagacttgaatctagttgaagaaaagatgtacatatatgtacatcttttcttcaactttgtgtcttaaactcggtttgttttaatccccgaattgtgaaagctcgagacattttggatgctaaaactggcttgtacctagtaagctatttgagtttatggaaagacatggacttctaaatttgtatggttttatgggaagtttatatgcacattttggtattttgtgtcgttaaaaaaaaaaaaaaaaaa

SEQ ID NO: 7966 - DNA, 1776 bp, Glycine max
  misc_feature (627)..(627): n is a, c, g, or t
  misc_feature (795)..(795): n is a, c, g, or t
  misc_feature (797)..(798): n is a, c, g, or t
  misc_feature (828)..(828): n is a, c, g, or t
tttatgggttacttgctgtggggctgttcaaatctttaatttttctttgccaaggtgttctcgtgactgaactgttaagctctctaatctatttctttctccccttgattcagctacggaggccccccccccccatgtcttcttctgctgattttttaacatagaaaatcttgaggtttttttaaattctaatgttccttgcataagtataacatggctaaccggtttttacttttaagtcactttggtataatgactttttgttaggtaagtaaaatctatttcttaaaattccttcatttgcctccattatttggcatctggtcagaatatcttgataaaagtagtggttttacagaatatacttattttgatccagtggcatgaagtgtttgtaattattctgcgttggtaaaggaactgatatttaaagtgcttgtagttattgtggagtttatttttttgaagtcatggaatgtactaataacaggtttttgttattcatctctcttcaggtgtagcaagaacatgaataacttggtcctatctcttgttcctaaattcgcaaaactgcaaactctaatcctccgtcaagacaagcctcaactagaggataatgctgttganactattgcaaaatgctgtcatgaactgcagatcctggacctcagcaaaagtttcaagctaactgatcgttcactctatgagctcgcccttggttgtcgcgatcttacaaaactcaacatcagcgggtgttcagcatttagtgacaatgctctggcttaccttgccagntnntgcagaaaactgaaagttctaaatctttgnggatgtgttagagctgcatccgatactgcattacaggctattggacaatactgcaatcagctacaatctttgaaccttggatggtgtgataatgttggcgatgttggagtgactactttagcatatgggtgtcctgatcttaggatagttgacttgtgtggctgtgtccgtataacagatgacagtgtgattgctttggcgactagatgcccccatctgaggtccctaggactgtactactgcaagaacatcacagatagagcaatgtattccttggcacacagcaaggtgaacaacaggatgtggggaactgtgaaaggaggaggaaatgatgaagatggtttaaggactttgaacattagccaatgcactgcactcaccccatctgctgttcaagctgtttgtgactcattcccttctctccacacatgctcagggaggcactcactcatcatgagtggctgcctcaacttgacatcagtgcattgtgcctgtgctgtccatgcgcaccgtgcattcaccactttcccttatcctgcccattaagaagctcatgcttttgatgttgaacacacttcgaggatgtgccccttgaaagggctcagagaagtgaaagaagtgaaatccaccccccttgtagatgtatgcctgcataagagagacttgaatctagctgattatgtacatcttttcttcaactttatgtcttaaactcggtttgctttaatccccgaattgtgtaagctcgagacattttggatgctaaaactggcttgttcctagtaagctattttgagtttatggaaagacatggacttttaaatttgcatggttttatggaagtatatgcaaattttggtaatattctgtcttcattcccgaggatgatattcgtaagaggaatatcaatatacaagaaaggctgggggggctaccccctgagcacgt

SEQ ID NO: 7967 - DNA, 2078 bp, Glycine max
  misc_feature (112)..(112): n is a, c, g, or t
tcaacacagagtatgtttagaccctcgcgaacatctctttggcaacacacaaattcattggggacggccactagacacaatctctgtcgcgttccggccgctttgtacggtngtggggctagtcttgtcgcgcgaaaggggccaattctggtgccggcgcctcgtttgccttaattcagtccagtctggggaaaagggggcatgtttcccccaaggtcgcttaaacctgggtacacccccagggtttttgccccatgtccccggacgtggtaaagcgccgggccagggaatgttaatccgcctcactttggggcgaattggggtaccgggccccccctcgagtcagctacgtaggccccccccccctgaatggaagagaccattttcttgttgcgggaaggataacatgggatttcaggagactatctgaggaagaatcggattggggcaataagcttctgtttttaccagcagcaaagaatatgtcaatgcttgtggttgagtccagcccttggaatgcaaatgattttggaattccgtatcctacatacttccaccctgcaaaggatgctgatgtgttcatgtggcaagatagaatgaggcaactagataggaagtggcttttctcctttgctggtgctccccgtcctggcaaccccaaatcaatcaggggtcagttaattgatcaatgcagaaggtcaaatgtttgtaagctgttggaatgcgactttggcgaaagcaaatgtcattctcccagcagcataatgcagatgtttcaaagctcacttttctgcttgcaaccccagggtgattcgtacacgcgaagatctgcttttgattcaatgttggctggttgtatacctgttttcttccatcctggctcagcatatacacaatatacttggcatcttcccaagaattacactaagtattctgtcttcattccagaggatgatatccgcaagaggaatatcagtatagaggaaaggcttagtcagatacctcctgagcaggtgaagatcatgagagaagaggtcattagtctcattccaagactagtatatgctgatcctcgctccaaattagaaactcttaaagatgcatttgatgttgcggtgcaagcagtaattgacaaggttacaaatttgaggaaggatattattgaaggtcgcacagatgacaacttcattgaggagaacagttggaaatatgctttgttgcctgagggagagcatgaggtaggacctcatgaatgggatcctttcttctccaaaccaaaggatggtagtggagattccaatgattcatctgctgaagttgcaaaaaattcttggaagaatgagcgaagaaatcaatcatgaatggaagggagaaaaaatctgcagggtgcttaaggcttaatgcagacttaacaatggtttgcttgaattggagaaaaattacaaattattgttgggtgttgttgtggacttactgctgaacttgtgtcttaggatattgagcgagcttccctcattgaaacccttgacatggagacatattctttgctatacacatttttgtgttacaggtttttctgatttctgcttcatgtattctcctcactccttagtggttcctagaatgatttgggaggtttaataattcctttcatgtaatagttttattcatttgattcatataggaaatataaacaaaattattacagttaatggcaaaccagaacaagtttaaccattgaagtcccggatagatcagttgaagcgacatttttttgatgcatcagcctgtcaaaaactataatttgttgagatatttgataattttcagtaaaataaatgttctactgttttctacttttgcattgtttgatagtctggttcctttattcatagttaaattggtacattcattttagtatattgggttaatatttcattttgctgaatgcacctgtgtgaatggatgtcttgtttaactaactgtaatggaagcaactagagaaaatgtatgagctgttttctttccacgccagctgctttctggtttgtataatttacgtttctacatattgggtt

SEQ ID NO: 7968 - DNA, 2817 bp, Glycine max
  misc_feature (2808)..(2809): n is a, c, g, or t
ggctcgaggaattgttgaggatcttaaagatgatagtgaaccttataggcgtatggttatggagactattgagaaggtggttactaacttgggggcatctgatattgatgcacggctggaagagcttctgattgatggtattctttacgccttccaagagcagaccagtgacgacgctaatgtgatgcttaatgggtttggtgcagttgtaaactcacttgggcagagagtgaaaccatatcttcctcagatttgtggtactatcaagtggcgattgaacaacaagagtgcaaaggtgagacagcaagcagcagatctcatttcaaggattgctgttgtcatgaagcagtgccatgaggaacaattgatgggtcatcttggtgttgtcttgtatgagtatttgggagaagagtatcctgaagttttaggatcaattttgggagctctcaagtcaattgtcaatgttatcggtatgacaaagatgactccacctattaaggatttacttcccaggttgactccgattttgaagaataggcacgagaaagtccaggagaattgtattgaccttgttggtaggattgctgaccgtggagctgagtttgtaccagcaagagagtggatgaggatttgttttgagttgcttgagatgctcaaagcacacaagaagggaatccgtagagctacagtgaacacttttggatatattgcaaaagccattggaccacaagatgtcttggcaaccctattgaataatctcaaggtgcaggagaggcagaaccgtgtttgcacaaccgtagccattgcaattgttgcagaaacatgttcacccttcacagttttaccagcattgatgaacgagtatcgcgtgccggagcttaatgtgcaaaatggtgtgctcaagtccctctctttcctatttgagtacattggtgaaatgggaaaggattacatctatgctgtgactcctttgcttgaagatgcactcatggacagggatttggttcacaggcagacagctgcttctgctgtgaagcatatggctctgggagtggctggtttaggttgtgaggatgcactggttcatttgctgaattatgtctggccaaacatttttgaaacttctcctcatgtgattaatgcagtgatggaagcaattgaagggatgagggtagcgttgggagccgctgttgttcttaattattgtctacaaggactgttccaccctgcacgaaaagttagggaggtatattggaagatctacaactctctctatattggagcccaggatgctcttgtagcagcataccctgccttggaggatgagcatagcaatgtttacagtaggccagagttaatgatgttcatctagtgtggattttgattacttagtttatttctatctccagtgtatttggcagtattctgtacttcctcgcatcaatgtaaagctcagttgttggaacattatttcgtgtcttgttacatagatagcaggttcctctcttgatgacatttgtttgatttgtatctcaccagatgatatgcttatagtagctaaccgttgaaggttgaatgaaagcctttgattagtcattaaaaaaaaaaaaaaaatcagctacgtaggcccccccccctacaacccaccgtgtcaactctcgttcaatcaccagcgattaagcgtgtctctcctaataccaaaacgctaccgttttgctcttttatttctctatggattgcaagaagcgagttcgggatgactcggacgagtcagttctggaatcgcccgaggcgaagcgactcagggacgatttactcgagttcttcgacgacgccgacgacgcaccttcctctcaggaccttgactccgtcatgaagagcctgcaggaggagatttccggcgtggcctcagattccggcgagtctcaggcgcagatcgggtaccttctggaggcctccgacgacgagctaggtcttccacccgccggaaactcgtcggcgccggaggagaagaacgtggagaccgagttggtccgagtcgcgtctgactcgtccggaatcggcgagttgtgggagtttgaggaacagattccgagatacgactcgtttgatttgggaatgggatttggctatgagtgtgatacgaccgaatacgctgcgtttggtggacttttcgatcattcggatttgtattatgactcgtggcggcacgagaccttgccaacacaatagaagatttaatgaaaacaaaaggaaaaaaagggttttagagatgtaaatattttcttctctctcagctttttcttttttcttttttgttcccttctcttgatgaagggaattacagaagaaagattataaagcaggacataggataacaagatgcaaaggaaattgcttctttatatatttatattttaatattttatattattaagaagaaacttctggctggaagcaatttctgctgatggtgcttgaaaaattaatctggacataattttggtaatcctgaaatctatctaacaaccaaggagattgtgtgtgtgtgtgtgtgtgtttttaataaaatatttagttttataaataaaaaataagtactgtattaaaagagtttttgcacttttatttgcttgaatgaggttatgtaagactaaataaatcttccgagtaaatgagtctagctcgtttggtgaaagtttgatgatattttctttgattcttataaattaaaagtaaaatatttttccttgtaagttttgtaacggaattttattgtttgaattggtggtgagtttgaactcaaannattttcaa

SEQ ID NO: 7969 - DNA, 935 bp, Glycine max
aagaattgggtcccacgcgcctgcgacgtcagcatcattacaccgtactctctctctctctctccattgtccccctttatatataagctccgagaagacgacacaaggggacaacccaccgggtcaactctccttcaaacaccagcgattaaacttgtctctctttaatctcttaataccaaaacgctaccgttttgctcttttatttctctctctctctatggattgcaagaagcgagttcgggatgactcggacgaatcaattctggaatcgcccgaggcgaaacgactcagggacgatttactcgagttcttcgacgacgccgatgatgcagcttccactcaggaccttgactccgtcatgaagagcttgcaggaggagatttccggcgtgacgtcagattacggcgagtctcaggcgcagatcggatacctcctggaggcctccgacgacgatcttgggcttcctcccgccggaaactcgtcggcgccacaggagaagaacgtggaggccgagttggttcgagtcgcgtctgactcgtccggaatcggcgagttgtgggagtttgaggaccagattccgagatacgactcgttcgatttgggaatggggttcggttatgagtgcgatgctaccgaatacgctgcgtttggtgaacttttcgatcattctgatgtgtattatgactcgtggcggcaatagagatttaatgaaaactaaatggaaaaaagggttttagagatgtaaatgtttcttctcagcttttttattcttttagatgaagggaattacagaagaaagattataaagaaggacttgggataacaaaaagaaaaaaaaaatgcttcgtcacccctctttatattttagtaagggaatgcttctggctccacacaatttctgcctatggtacttgaaaaattacttttggtat

SEQ ID NO: 7970 - DNA, 1250 bp, Glycine max
cccggcggacggctttcaccattattttcctttctctctcactcgaaacaaaacaaaacaacacaaccggaaaaccaaaccacctctccctgctcccgccgctgttttccgccgctgtcgccgtcgttcccacctcaccgtggcggcgcgcgcgtctccgatgggaaagtacatgaagaaagcgaagccgaaaggagaactcgcgctcgtcgaatccaccaccagcaacaccaccacctcctacatgggggtccgaacccgcgccaaaaccctagcgcttcagaaatcgcacgcgcagcagcacgagctcgccgccacctccgactcctacctccagctccggagccgtcgcctccagaagcctccgattttggtccactctccgaagcgccctaagcacccgaaccctaaatccccaatccccgaacctcccaggctcggactcgcttcggagcgcgacgctaccctcaaccacaacaaggacaatactttgcatgagaatgccgagcctcaggaagcgtcgttcggggaaaatgttttggattttgaaggtagagagagaagcactagggaatccacaccttgcagtttgataagggactcggatactgtcaggactccgggttcaactaccaggcctacttgttcagctgaagcttatcgaagaacagagcatgcagctagaaggcaaatcccaacctcccgtgaaatggatgaattctttgctgaaattgaagaggctcagcaaaaaaaattcattgagaagtacaactttgatcctgtgaatgagaagccgctctcagggcgctatgaatgggaaaagttgaaaccctagaagggtaatgtagtgttccatcaagacatctttgaagtagcaggcaggcagcagggttagaatttgttgaagcggtggtggcgttatttcacttttccatcaccttctatttacttgtaaagaaagtaggactcttaaaactgtgtagactaatggtctgtaactttacagaggttgttgattacacaccaatacaaatcaaaggcctttgtctaacagatcattttaaggaagggggcaagggaagaaggggctgtagcgcgtaggattagggatcagtcaaattaggtcagtatgaggtacaggaatttacctaggttttctcttgttcttgtattttactcatcttttgtctacacttgtactgatggaacttgaacaaacttttagaaataaagacccgattcccccccct

SEQ ID NO: 7971 - DNA, 2211 bp, Glycine max
ctttcttcttttatttctcttgctctaatctcacaagtcacttgcaaatgctcccaatttcctcttcaatttagggtttcatctttcgcttcgagtttgcgcatccatggattccatctacgcgagctcgacgtgcacggttcctcaccttctccgtcgcgagactctgttcttgccgcgaacatcgattccttcttcctcgcttcggcgagcgaagaaggcgcggcgcgcgagggtttcgagttctgcctcgacgacgacgacggcgagcagtatcgcttcaaacggcgccgtttcgagggcgttgcagggagtgagcaataagagtaacactgcgctggagcagctcgacatcgagcgtggcgtatgcatccctttccgcaagtactcgccggagatcgtgaggaataaggtattaaaatcaagagggtccattttgtcacttatgttgcggggagtggagatagtttggaatctgggcttgtactggtctaacttggtgtatgatttcctggttggaagggatgaagaggttgttccgtatcgtgctcgacagcttaggaatctcttgtgtgatcttgggccttcctttattaaagctcgtcccgctcccgcagcccggccagatatcattcgagaagattatatgaatgaactgtgcattcttcaagatgatgttccttcatttcccaatgaaattgccttcagaatcatagaggaggatctgggtcaaccccttgaagctgttttcagcaaaatctcatcagagacaatagcagctgcaagtttaggtcaagtttacagagctactttacgtgcaactggcgaggatgttgctatcaaggttcagaggccagggatagagcccattatatatcgagaccttttcctattccgcactttggcttcattcttaaacggcattagcatacagaaattgggatgtaatgctgagctgattgttgatgaatttggtgaaaagcttttggaagagcttgattataccctggaagcccgtaatcttgaagactttcttgagaattttaaaaatgaccctactgtcaaaattcctcaggtttacaaacaattttctggtcaacgtgtgctggtaatggaatggattgatggtatcaggtgcaccaatccacaggccatcaaagaagccggtattgatgttgatggatttttaacaattggagttagtgctgccctacgacaattgttggaatttggattatttcatggagaccctcaccctggaaatatttttgccatgcgtgatgggagaattgcatatgtggactttggcaatgttgctgttctcagtcagcaaaataaacagattttaattgatgctgttgtccatgctgtgaatgaggactatgctgagatggctaatgatttcaccagattaggcttcctgaccccagggacggatgtgactcctataattcctgctttggaagcaatttggcagaactctgctggaaaaggactgtcagattttaattttcgtagtgtcacaggaaagtttaaccagttggtttacaattatcccattcgaatcccagaaaggttttcacttgtaattcgttctttattgacccaagaaggcatctgttttaccatgaaacctgacttcaaatttcttgaggttgcctatccttatgtggctaagcgactactgacagacccaaatccagctctacgtgaacgcctcatacaggttctattcaaagatggccttttccagtggaaacggcttgaaaaccttattgttcttgcaaaggaaaatgtggccaagatgagcaacaatccagcattgcaagtgaaaaacacgcaaagccagagagacttaaaagttgaaagaaaactggacctcacaggcacaatcaaagatggagctcgccttttctttgttgatgaaggaatacgtagacagcttctccttgctttgactgaagattcaaagcttcatattgaagagcttgtcgatgtgtataggttggttgaagatcagatagacataccttctgtggctgtagaagtagctagaggtaaagttcttgtgaaccttgaatatgacttagttcaattagatttaattatcttttttgtctcaaaatatcatgatttttcatttggtccctcatttttctgttgttatttagttctcgaagtgttttccccgtatagtcacttaagattttt

SEQ ID NO: 7972 - DNA, 1148 bp, Glycine max
  misc_feature (907)..(911): n is a, c, g, or t
  misc_feature (1096)..(1100): n is a, c, g, or t
cggaattcccggctcgaccccgcgtccggaagagcgaaacagaagcagaagctctttgttggtgttctatttttggaattttctgctggtgatctcgttggaaaacccgagctttctgaggctcgggatctgaattgtgaagatggattcaaattcaacaaaggagaagctgcagaacagtgttgttgttgcagatggagctgaccttaagtcttgctatatgcagaagttcaggctctatgagactcgctcgaaattttacatgattggaagagacaaaaacagaacatgttggagggtcttaaagattgacagattggagccatctgaattgaatatcgttgaagattcaacattatactcagaaattgagtgttgtgaccttctgaggcggatacatgaaggaaacaagtcaacaggggggcttaaatttgtaacaacttgctatggaatcatcggatttatcaaatttcttgagccatattacatgctgcttataacaaaacgaagaaagatcggcacaatctgtgggcacactatatatgctatcacaaagagcgaaatggtcccaattcctcatgctactgtgcgatccaaaatggcttattctaaggatgagaacaggtctttagtcaattttgcatgtaattgtaatgtgtctatggtacatttaaagagacatgtagacagtagcattgagagctataccttgtccattgtacttagatgttatgaattacaattttttaatttgagttcattatattgtgcagtgaaaacattctgttagagcatagttgtgttgaaattatacattttagactttttctttgtactatatttgttgattgtctctcttcagtgtgtatccacaatgtgggcttcttcagatcaacccttatcatcnnnnngtgggtacactttaatcatcttagttattaaatagaatcaataatgcttctgcctgactttgaagtcatgtaatatgtatagtagatacctactttgttgttttcttgttctacatttattgtcagttcatttcctgcaaatgtacaggcacaatcttcattgctgttatgatgtaaatgtaacnnnnngattgagacaaggtattgccagggtttcaagttcaattgggagatcac

SEQ ID NO: 7973 - DNA, 983 bp, Glycine max
accaggcattttcagccccaacagggaaaaccagcactatgggagctagattcagatcagcattacacggtccggaatccccgcctcgtacccacccgatccgacagcgttaggtcaactattaaaagatcactatcagatggtaacattctcagtgaaagtgacactacaattaggaacttgaatgttacaaatggtcagaactcgtctgaaaaacctgataagcgtttcctttcggggtctactccagatatctttacctgtggaagtgatatttgtcattgcaggcagatatatgtcaagggccaaatttgtgagagtgatcatatttgttatgatgaacatggagatgcatgtgactgctccaatttccttgatgtggactggctttcttcttctggaaattcttgtgaagaggaattacttgaaaggtcaaccagcatctcctcagagaatattgcgaatgaactaataactactgagacatctgcaagtgaatctggatccagcattaagggaaggccgagtggagaagaactcaacaaagatagcaaatacagcgaaagctttgaacgttggataactgaaggggagatgctttttgtttgaggcagtttaatgctcgacttttatcatcacatccgaaggatgtgaaggtggaggacggttcctgacttgctgtacagaaataaatggtaagatatcatccaaaagcaaataggagtggcagcagctgagacaagctgagttttgcaagacaacatttgagttactgattatatttttcttcaaatagagagcatcatttgggaggtaatggtagatgtcaatagttaattcgtttttgtgcctccacaaacattccataatcataaaccctgtatataatttaaattcaaaaaaaccaaaaaaaataaatcatagctggttcttaggttataactgccccttaactcatctgcagtcaacttttttggttcctt

SEQ ID NO: 7974 - DNA, 1419 bp, Glycine max
atcttattgctgggtaacttttaacggttactgtattactggtttctaaatttacttcaatagtgagtgctagtattacatgttctcagaaaagatttgatgtaatctttttgacaagtgttcattttatggtatggtgtgtagatcaaactttttatatctgacaatgagttcaacctgactatcattgctaggcgctcacggcattatgctgggaccagatatttgaaacgaggagtgaatgaaaagggtagagtagccaatgatgttgagacagagcagatcatctttacagatgctcgtgatggacgcccaatgcaaatcagttctgtggtgcagatccggggttcaatccctctgttctggtctcaggaagcctctagattgaatataaaacctgacattatattatcaaggaaggactctaattttgaagccacaagacttcattttgaaaatcttgtcaagagatatggaaatccaattattatactgaacttgataaagacacgtgagaagaagcctcgagaaactattctgcgagccgagtttgcgaatgctgttaggtctcttaataaaaatttgaaaggcgaaaatcgcctgaggttccttcattgggatctgcataggcattcaagatgcagcaaagctactaatgtgttgggacaactgggaaaagtggctgcatatgcgctgaagctgactggcatcttctattgtccagtgacatcaaatgtgaggctagatggattttcgcattattcctacaccgagaataacaatgtcactgatcactgcatcacagaacaagctagtataaacaaggataatgttgataaagaaacagaaattatcaattgttactgtagtagtgatgagaacaaagattacagtgtcaaaccccagatgcttcaatctggggtcttgaggactaattgcatagactgcttagatcgtaccaatgttgctcaatatgcttatggactagctgcacttggatgtcagctacaagctttaggatttgttgaaaccccgtatattgatcttgataaccctttggccaaggaattaatggaaatctatgagtccatgggcgacacattagcctttcaatatgggggttctgcagcacacaataagatattttctgagagaagaggtcaatggaaggcagcagctcaatcccaggaatttattcgaacactacagcgttattataacaacacatatttagatggtgataagcaaaaagcaattaacttactcttggggcattttcagccccaacagggaaatccagcactatgggagctagattcggatcagcattacactgtcaagaaacatggtctgtatgtagcagatgacagcgttaggtcaactattaaaagatcactatcagatggtaacattctcagt

SEQ ID NO: 7975 - DNA, 1497 bp, Glycine max
  misc_feature (1478)..(1482): n is a, c, g, or t
tcagctacgtaggcccccccccctttccctgttgactgttgcagatccgcggaagttgagactcattataggtgttgtttctggtgtggtgggagcacttggtatgggcattatcggctttctctgttatcgtagaaagaagaatcgttatgcaatctcatatatacaatctcgtagcctctcttctgatccatcttcaaaagacactgagaagggagttcaaagctttactcaaagctttgtaccaggagtgcccctcttcttgtatgatgaacttgaagaggccacaaattactttgactcatctaaagaactaggagaagggggatttggaactgtgtattttggcaaactgcgggacgggcgttctgttgcagtgaagaggttgtatgagaacaacttcaagagagttgcacagttcatgaatgaaattaaaatcctagcaaagttagttcatccaaatcttgtgaagttatatggatgcacctctcgccacagccgcgaacttctgcttgtatacgagtacattcctaatggaaccgttgctgatcatcttcatggtcaacgatccaaacctggaaaactcccttggcatattagaatgaatattgctgtggagaccgcaagtgcattgaaatttcttcatcaaaaagacatcatccaccgagatgtgaaaaccaacaatattcttcttgacaataacttttgtgtaaaagtggccgattttggactctcacgtcttttcccagatcatgtcactcatgtttcaacagctccacaagggactccaggttatgtggatcccgagtaccaccagtgctatcagcttactaaacaaagcgatgtctatagctttggagtggtgctggttgagctgatatcgtccttgcctgctgtagatattacaaggcatagacaagaaatcaaattgtccgacatggccatcaacaagattcatagtgaggcactgcatgagctagtggaccctagccttgggtttgaatcgaatttcaaggtcaggaaaatgataaatgctgtggcagagttagcatttcagtgcttgcagagttccaaagagatgaggccttctatggaagaagtggcagacactctcaaggatatacagagtgatggcaaacataaaagccagcctgaggtaatggatatcacaagcacagctgatgatgttgtgttgctgaaggatgaccctcctccaccatcacctgattctaatgcggtgagcaagttgacaacaccaaatgctagcggataagaggaccttctttctcacttccatgaaattaaccttatccaaatttatgtaagcagagttagttagcatcacattggtaccagtatccacccagttactgcccgcatattgtcatcttcttatgaggataaattttaagattgagatgtatatattgatgataaagctgctttggttatgaaatttcatctttaacaattatagnnnnntattcttttattttt

SEQ ID NO: 7976 - DNA, 1305 bp, Glycine max
ccacgcgtccggccacgttgacatgacacagtttctctcttcggggtccggcttggcccgcgagccatctgcggcccccccccccatcatcactgtcttgtccgttttctaaatctcattcttcacctgcaactatttggattgctgatttttgttaataccatatttactgatattggcgcatttctttgagaaagttactaattcctagatagaggcaaaaatgttgggaattttcaaggagaagttggttaaagcacccaaagagctgaacagtccagcttcgttgaattcatgcactaagcctaagctaagtcacgaaatccttcaggatttcatgtcctgcaattcctccaatgctttctcaatgtgctttgggaatgaagctttgctagcctattccccttcaaacaagccctccattcatcaaaggttgtttagtggtttggataacatatactgtgtcttcctgggtggcctgcacaaccttagcatgctcaacaagcagtatgggctatcaaagggaacaaatgaggccatgtttatcactgaagcatatcgaactcttcgtgacaggggtccataccccgctgatcaagtcctcaaagaacttgaaggcagttttggatttgtgatctatgacaacaaggatggaacagtttttgttgcatctggttctaatggccagattgggctctactggggtgttgcagctgatggttccatagttatttctgaaaatctggagcttataaaagcaagctgtgctaaatcatttgcaccatttccgaatgggtgtatgtttcatagtgagcatggtctcatgagcattgaacatccaacaaagaagatgaaagcaatgcctaggattgacagcgagggatttatgtgtggggctaacttcaatgttgactctcagacaaagatccaagtgatgcctcgtgttggaagtgaagctaattgggccacatggagctaacaaacttgactgatttaatcatagcccaacttttttttaaaacccttttctaagtggttaagagtacacaacttaatatgatggtgctgactctgcttttaggcttcagctcttttgggttatgtagtttttctcgtttggttccattgttctgtacatattcatgcttcaatgttgaacatgactatggtaatttctaatatcaataataagaagtttcagttttttgcttttaaaaaattgtgtgtgtatttgcttttgttatcgataattatataaaaattgattagtcgtcgtcacatgtgactgaacaggttttcaatttt

SEQ ID NO: 7977 - DNA, 1427 bp, Glycine max
  misc_feature (1247)..(1249): n is a, c, g, or t
  misc_feature (1251)..(1252): n is a, c, g, or t
cccacgcgtccgtacggctgcgagaagacgacagaaggggatcatatcattgtccgttttcaaaggctatcactaaatctcattcttcatctgcagctatttggattgctgattattgttaactgatattggtgcttttctttgagaaagtgtgtacactttttggataagagaaaacaagagaggtgacattggaagctaactcagagagaggcaaagatgttgggaattttcaagcagaagttggttaatgcacccaaggagctgaacagtccagcttctttgaattcatgcattaagcctaagctaagtcatgaaatcctgaaggatttcatgtcctgcaattcctccaatgctttctcaatgtgctttgggaatgatgctttgctagcctattccacttcatacaagccctccattaatcataggttattctctggattggataacatatactgtgttttcctgggtggcctgcacaaccttagcatgctcaacaagcagtatggactatcaaagggaacaaatgaggccatgtttatcattgaagcatatcgtacacttcgcgacaggggtccataccctgctgatcaagtcctcaaagaacttgaaggcagttttgcatttgtgatctatgacaacaaggatggaacagtttttgttgcatctggttctaatggccatattgagctctactggggtattgcaggtgatggttctgttataatttctgaaaatctggagcttataaaagcaagttgtgctaaatcatttgcaccatttccagctgggtgtatgtttcatagtgaacacggtctcatgaactttgagcatccaacacagaagatgaaagcaatgcctcggattgacagcgagggggttatgtgcggggccaacttcaatgttgactctcagtcaaagatccaggtgatgccacgtgttggaagtgaagctaattgggcaacttggggctaacaagcttagctgattcttagtccagcatttttctttctaagtggttaaaagtgtaacctaatatgatgagtgtgtgactctttgcttttagcccgtttggatatctgcttttctcgtttggttccattgttgtgtacatattcatacttcaatattgaacatgactatggtaatttctaatatgaataacaagttttagtttttgacttaaaaaaaaaaaaaaaaaaaaaaaaaaaaaaaaaaaaaaaaaagggaagaacagaaaacacaannngnnaaaaaaaaaaaaaaaaaaaaacgcgggggcgggcccggggttccacaacgcccaaaaggggaaaaaccggggcgccccccaagtcacttcttttgcagcatatccctttttaacccggtggcataacggagtagacgcccccacagaccgcccttcccaacatttggagagtcta

SEQ ID NO: 7978 - DNA, 744 bp, Glycine max
  misc_feature (607)..(607): n is a, c, g, or t
  misc_feature (639)..(639): n is a, c, g, or t
ggcaatcactgaatctcattctctatctgaatctttttggattattactgattttgttagttgctgtattgatacttgttcatttctttgagaaagcctatacaatccttggagaagggaagaaaaggagagtactggtaacattggaggggaacaacaatacagagccagaggaagagacaaattaagatgttgggaattttcaaggacaagttggtcaatccaccagaagagctaaacagccctgcttctttgaattcatcaaaaaggtctaaacttccaaatgaaatccttcaggaattccagtcctacaatccctccaatgctttctccgttagctttggaaatgatgctttgctagcttattccccttcaaacaaggcctccattcatcacgggttttgtgttttggataacatatactgcattttccttgggagcctaaacaacctaagcaagctcataaagcagtatggtctatcaaagggaacaaatgatgcaatgtttatcatagaagcctataggacacttcgtgacaggggtccataccctgctgatcaggtcctcatagaacttgaaggcaaatttggatttggtgatctatgancataaggatggaacagtttttactgcattggngttctaatgggacaaattgagcttttctggggtggtgcagctgatgggtcctatagttatttcttgagatttggaactgataaaaccagttgtgctaaatatttg

SEQ ID NO: 7979 - DNA, 1696 bp, Glycine max
atattttgcacatagctaagctaagctatctcttcttttccgttcaaatcaaaaccacaatcattcattcattcaccgaaactcaacaacaacaattcttcctccatgttctgaaccgaccactcaatactcgactcaccgaatcggcttctttcaatctcaacacgcaccaacatggccaccacaaggtcatcttccgaggacatcgtcgattccacgccgctgctcgccaattccggcggctcctccgacgagctcacctccggccgcggtttttcgcggcgacagcggctacggcaggcggcgcggttcctccggcgggcgagcgggcgccggatgatgcgcgagccgtcgatgctggtccgggaggccgcggcggagcaattggaggagcggcagagcgattgggcgtattcgaagccggtggtggttctggacatcgtgtggaacttcgcgtttgtggttgtggcgggggccgtgctggttttgagcgcgagcgaagcgccgggcatgcctctgaggttgtggattgtagggtacgctatgcaatgcgtccttcacatggtttgcgtttgcgtcgagtataggaggcggaggaggcagcaacgcgccgccgcctcgtcagtgcaagacagggttgggagcagcagtggaaatttgagtgtatcttcgagggagggttctgcttctggctcggcgcagtatgtgtcgttgggccaactcgatgacgagggtactagtgttgcaaagcatttggaatcagcaaatacaatgttttcatttgtttggtggattattggattctactgggtatcagctgggggtcaagcattagcccaagactctcctcagctttactggctatgtataatcttcctgggttttgatgttttctttgttgttttctgtgttgcacttgcgtgcatcattggtattgctgtttgctgttgccttccatgtatcattgcacttctttatgcagttgcagaccaggaaggggcatcaaaggaagacattgagcagttgtcaaagtttaaattccgaagaattgaaagtaatgagaaacttaccggtactatacaaggacctgttggaggaataatgaccgaatgccaggctgattcacctattgaacatgttcttgctgaggaagatgcggaatgttgcatctgcctttcttcttacgatgatggggttgagctaagagaacttccttgtggtcaccattttcactgtgtctgtgtggataaatggctgtatattaatgctacatgccccctctgcaagtataacatcttaaaaagtaacaccctcagtcaagaggaagtgtagaagatcgatgtcagggaagtttttagcagccatgttgaggaatctgcacactttcgattcacagccatgttaatatactttgatacgggcctatacagttgcagctgctgctgtgtgctgtaatcatgtaatgatagctttttttattatttgtagttattgtggcttctaactggttgtgcatatcagtgttgtccagtgcataccggctataattatctcaagaggcaatttggttgtcatttttattgtcctcatcattattgtatatggaaccattatgtctcgcctaagccactgtggaatggtttatcatgtctcagtatatgttacaaaaatgtttattccaaaaaaaaaaaaaaaa

SEQ ID NO: 7980 - DNA, 781 bp, Glycine max
gccccacgccggccgggacggcataacttgcattgaacaatagaaaataacaaaaaaaagtaaaaaagtagaaaagaaatatgggtgctttcactgagaagcaagaggctttggtgagtagctcattcgaagcattcaaggcaaacattcctcaatacagcgttgtgttctacaattcgatactggagaaagcacctgcagcaaaggacttgttctcatttctagcaaatggagtagaccccactaatcctaagctcacgggccatgctgaaaagctttttgcattggtgcgtgactcagctggtcaacttaaaacaaatggaacagtggtggctgatgctgcacttgtttctatccatgcccaaaaagcagtcactgatcctcagttcgtggtggttaaagaagcactgctgaaaacaataaaggaagctgttggcggcaattggagtgacgaattgagcagtgcttgggaagtagcctatgatgaattggcagcagcaattaaaaaggcataattaggatctactgcattgccgtaaagtgtaataaataaatcttgtttcaactaaaacttgttattaaacaagttccctatataaatgttgtttaaaataagtaaatttcattgtattggataaacacttttaagttatatatttccatatatttacgtttgtgaatcataatcgatactttacaagggccccccgggggcccccaagcggcccgccttacgtgaaaccatccacccctaatcaaggtttttttggcgggtcccagg

SEQ ID NO: 7981 - DNA, 921 bp, Glycine max
tcagctatgtaggccccccccccttctattaagcaaacttttggttctgttctccaattcttgaatcccaattccaaaacttccacccaggatccaacaagggctagtttaatttctgaattttacaaaactgtgatgacaaacgcagcgagtgttacaagccatgctgcgtgtattctcatgggaagcacaagtttgttacttgggacagtggcgaattttgttgagttgagcccttataggccctttggaacatttattttctgcaacggaaatggacaattgattgtggtgaaaaactcagatgctgttttgcaactcttgttccacactgctcagatgagcgatttggcagaacttccagaagttgccaatgttagcatattgcaacaccaggcctatgaggctgaattggatgatagcttgggaatgcagaatgtagtgtacttggagcaactagagcaacttccgttgtctgctgatggttctaatagcgatgttgcaacaatcagtgcagccttggatggccttggactgagcacaagagcaaggctgtgtctacgagcagctggtgagttggaaaagcagaagctaaaaaatgaggagaaaatcaagaaggagattcaggagaaagccgtgccaagcatgacgaagcttcaaaattacaaaacaacatgtgagatgcacaaggggaagggctattacgatgccttcaaggtgcaaaatgaggaaaacgacttccaagcaaatgtgaagaggcttgtgttagcaggggtatgggatgaagtgattgagatgctaaagaggtttgaactccctgtagtttttgaatggtatcctatttgattgttcatggtatcttttcctttttacatatctactactttctacatttttttcacttttttacatcttttcttt

SEQ ID NO: 7982 - DNA, 1839 bp, Glycine max
caacaccgaacattgagttattctatttctcccgagtattctgttctcctttattaagcagctaaaaattttaaggaaagggaaaatgaagaatctttgtcagaattttgatgttagagccacgattccggttaaaataggaaaaaaatcgacttgggatgttttgtttcctcgtaggttgtggttgccgacgtggacgtgtgatcagaggaaggaggggaagttgaacttaaaggtgcagtgcggtactaggaaagaagggtgggttgaatctgcgggaaaaagcgcgtttgggtttggcgtttcggccgcggttttgttctctgcgttctgctactcgcccgcggcgcttgcagagtccctcaccgttgcttttcccgtgtctcgggcgcctgaggtaaatgcagttcaaagaactcttgtggaagcatggggtttaattcgagaaacatttgttgatcctacatttaatcatcaagattgggatttgaagttgcagcaaacaatggtggaaatgtttcccctgaactcagctgatgcagcatacacaaaactccgtggaatgctttctacccttggagatcctttcactcgaattatcagcccaaaggaataccaagggtttaaaattggaagtgatgggaacgtacaaggagtgggattgttcataaatgttgaaccaagaacaggacatttggttgtcttgtcatgtgtagatggcagtccagctgctcgtgctggtatacatcaaggggatgaattgattgagataaatggtgagaggcttgatggcattgatagtgaaactgcagcacaaaggcttagagggaatgctggaacaactgttacagtaaaggtcaaagactcaggaacaagatcttttatccgagaggtcaaacttcctagggagtatattaagctctctccaatatcaagtgccatcatccctcatagatccccagatggtcatttcacaaaaactggctatgtgaaattgtcagccttctctcagactgctgctgaagacatgaggaatgccattcaggaattggaaaatcaaggagtacactcgtacatattagatctacggaacaatcctggtggtttggtaaaagccggccttgatgttgcacagatgtggttagatggaaatgagactctagtgaacacaatcgatagagatgggaacatgctacccattaatatggtcgatggacatgctataacacatgatccacttgtggtgattgtcaatgagggaagcgcaagtgccagtgagattttagccggggcattacatgataacggtcgagctattcttgtggggcacaaaacatttggtaaaggaaagattcagagtgtcactcagcttcatgatgggtcagcactctttgttacagtggcaaaatatctatcaccagcccttcatgacatagatcaggttgggataacaccagatgtgcaatgcacaacagaaatgctcaattcaaccaaggatatttcaaattcaaccaaagacaaggcctcagtctcatctctggaagcagattcatgcataatggtagcagaacatgagttggatttggaggagtccatgggaactgcttcttgaacattcaatttccttatatcacactttcttttcaatgtttaacagttgaaagaaagggtagtttagtgctgatgtgtcagccaattcatcattttgtactatgttacattgggatcactagttgtcatgggtatataaaacagagaaacagattgtattgtatatacaattgaatagaataatagaaaatttaactcctaattgaagcacgactaataaagccttat

SEQ ID NO: 7983 - DNA, 970 bp, Glycine max
caagctagcatttactggctcaacagataccggaaaagttgtactcgaactggctgctacgtgcgcccccccccccgtgacattggagcttggagggaaatcgcctttcataatatgtgaggatgctgatgttgacaaggctgttgaacttgcacactttgctctgttctttaatcaggggcaatgttgctgtgccggctcacgtacctttgtacatgagcgtgtctatgatgagttcttggagaaatcaaagaaacgggctttgagacgtgttgttggtgatccattcaagaaaggtgttgaacaaggtcctcagattgacgtggaacaatttgagaaagtccttaggtacataaggtctggaattgaaagccatgccacccttgaatgtgggggtgatagattgggctcaaaaggcttctttgtccagccaactgtcttctcaaatgttcaggatgacatgttgatagcacaagacgaaatctttggcccagttcagtccatcttgaaattcaaggacattgatgaagtaatacgacgggcaaataaaacacgctatggtctagcagcaggtgtgtttactaagaacgtgagcacagccaacacattgatgcgggcactgagagctggaactgtgtggattaattgctttgatgtttttgatgctgcaattccttttggtggatacaagatgagtggtattggcagggagaaaggaatctacagtcttcacaactacctgcaggtgaaagctgttgtctcaccagtgaagaatcctgcgtggctataaaatgtccacacttgtgtcccttgtgtcttcaacaataaaaatcgattgcacacaagagctgaattttaatcatgaattaatcacctcgaatttgatgtgatcttagctaacaaacgtgcttcgtatatttatttatccaaaataaaaagttccatgcatctactactagtttactacttg

SEQ ID NO: 7984 - DNA, 1491 bp, Glycine max
  misc_feature (1473)..(1474): n is a, c, g, or t
  misc_feature (1479)..(1479): n is a, c, g, or t
  misc_feature (1481)..(1483): n is a, c, g, or t
  misc_feature (1485)..(1485): n is a, c, g, or t
tacggccgacagaaggggattacgacagagggccccccccccgccatcattcaacgttctctctatttgtcgttgtagcgccgcagccagcggttgaatttggaaaaagatgtctcaccggaagttcgagcacccgagacatggttcccttggctttctcccaaggaagcgagcttctcgtcatcgcggaaaggtgaaggctttcccaaaagacaatcctagtcaaccatgcgggttgactgcttttgtgggctacaaggctggaatgacccacattgttagagaggttgagaaacctggatcaaagcttcataagaaagagacatgtgaagctgtcactatcatcgaaactcctccattggttgttgttggagttgtgggatatgtgaagacacctcgtggccttcgcacactgaatactgtttgggctcagcatctaagtgaagaagtcaagagacgattttataagaactggtgtaaatctaaaaagaaggcttttaccaaatattcaaaaaaatatgaaactgaggaaggaaagaaagatattgaatctcagcttgagaaattgaagaagtatgcaactgtcattcgtgttctggctcatactcagataaggaagttgaagggtctaaaacagaagaaagcacatttgatggagatccaagttaatggtgggacagttgaccagaaggtggactatgcatatagcttcttcgagaagcaaatcccagtggatgctgttttccataaagatgagatgatagatatcgttggagtgactaagggtaaaggttatgaaggtgtcgtaactcggtggggcgtcactcgccttcctcgaaagactcacaggggtctaaggaaggttgcttgtattggtgcctggcaccctgctcgtgtttctttcactgttgccagggccggtcagaatggatatcatcaccgcactgagctgaataaaaagatctacaaggttgccaaggcagatcatgagtcccattcagccatcactgaatttgacaggactgagaaggatattactcctatgggtgggttccctcattatggtgtggtgaaggatgattatattatggtgaagggatgctgtgttggaccgaagaagcgggttatcactcttcgtcggtctcttctcaagcagacatcgcgggtggctctggaagagatcaaactcaagttcatcgacacctcgtccaagtttggacatggccgcttccagaccactcaggagaaacaaaagttttatggtcgcttgaaggcataaatttttgttttggagacaacttgtgatgaaaattttgttgcaaaataagacatttagtggtctttttttttatttgagtccgacctattctcagagttgtttcttttagttgctttgaacaacaattgcatttttttcctattttattataatatcagccacatttttatggttagtacttaaaaaaagacggnntcaanannnangacacc

SEQ ID NO: 7985 - DNA, 1610 bp, Glycine max
cctgcaggttccggtgccgaattcccggggcgacccagcgtccggttatgaatatgtgcccatggatgacaagcgggagtgttcttctgtctctaatcctcccactgataactttgagaccaagtttttatctgcttctcatgactgtgttatacagaagatgccaattgcaagaagccaacgatttagtgaggaaataacttctgatgaacgggtaaagatgcaacaccctacaagttctgattctaccgtcacagagccaactcaccaaactgcacatgaatgctgtatgcaaatggcaaatgaaatgatctgtattcagaatcaactttcagatattgaaatcaaacaggctaacatgatgcaccaattacagatgtttacaactggcataatggatgccctttctacaatccaatcaagaataacaggcttagagaatgtatttgatagattaagtcaagaatctttgcaaagaggaagacattcttattcagaaaactccaaattagggagacagagtgaaaatgttgcctctcccaggttctccatatgcactccaacaccaaggccatctgtggaaattaataataagcaatcagactctatgtcagttaaaaattccgaaagttgggagaaaaaggcattttcaaggagccaaccaaggattcattctggagatagtttggatatgtggaaaagtaacaaggtcaaggctaccagaaaatttacagagaaggatgttttgaacagctcatcaaaggataccttacaaatgggttctgtaaaaaatgatggtatcttctctgctaccagaataaccaatgccagaaatgattgttctgagagtaataataactactggaagcatgtaaaacgtcttgtatgtgaaggggatctgaactctgcatatagggaagctttgtgtttcagtgatgaatttattctcgttgagcttttgaatacaactggtccagttatagaaagtttatctgtgaagacaatgaatgttcttcttagtactttagcatcatatcttctggaaggaaaattatttaatactataatcccgtggctgcagcagattgttgaaatgagtactatccatggaccaaattgcattgctatctctattgaagccaagaaacatcttttatcggcagtccaggaggccatgaacctgcattttttcagtcatgcagaaagaaggcgtgtggctgaattagcaatgaaattacatcatatatggggtaagatcactgaaagttaatattggtgtatctgacgaaaaaataatgtatgttgccattttctgttgggattcagattttgttcctcgttgaactcaaagccagttcttgttgtatgtattttgttcgttagttggtgggtgagtgttaggttttgcgaataatctgctagtaattctggaattcatgacttgtgaagtgtttttctttttccttcctgaattggcacctgtgtgcattcaaagagtattgcatctttgagaatggatgtcaatattgatcaccatgtactataattatgttcatttttttaatgctcatggtagaattttacattatttaatcataaaaaaaaaaaaa

SEQ ID NO: 7986 - DNA, 1179 bp, Glycine max
tcagcttcggaccacgaacgtgccataaagttcataactggcaaacaagcaacgcaaagcactagaaactaggaacagagaagcaatcagttgccaaactatttttctctctcctttttttgacttttctttctttctgcaactccaaaatgtcttccataggggcaaaaaatctagcactctcctcagcctttttgctccttttggtcggttttgcaacctcagacatcaaccaagacaaagcagaatgtaccgacaaacttcttggtctagctggttgtcttccctatgttggtggtgaagccaaagtccccgccatggattgttgctctggtatcagagaggttattgacaagagcaagaggtgcctctgcatcctcatcaaggatcgtgatgaccctaatcttggcctcaagatcaacgtcacccttgctctaagtttaccagatgcttgtcaaacacccaccaatataactcagtgtgttgatcttttgcatttggcacctaactccacggaagctaaggtgtttgaggggtttaaaaatgccttgaccaacaaaactagtccctcctcagtccctggtgctaataacgcgactgctaatggaacaagcacgagcgcgaacaacaacagcagtagtgggtggggaaagaggtggttggtgacagaggtgctttgtgggattttaccgtttgttttcatttcccatttattcctcttcgtagtttgaaccgagatcaagagtactaggatgttttggtggttgtgtctatttatttctcggattcattacgtgttctgcatataagtatatgttatgcaatttgtgatttatttttactaggtgctgtactgtctttttcctttagttatttttgcctcagtgtgaacccatcctctcttgcctgcatgattaattctccaactgattgaaggggacctgttacttgacctcaacaatgcgtatgctttaaatataattgtgctaggaccttctatttacacttggtattacgtgatcggttggatcgatgttgacaccttttctaagtgttcatttatttaatgagtgaataggtattttgatcccatctttgcactcattttataaattagtctctatcttattgaaatgtaaaaaatagtctctatgtttgtataagtattacaaaatagtc

SEQ ID NO: 7987 - DNA, 1300 bp, Glycine max
gtgcaataaagttggcaactggcaagcaagcaaagcactagaaaaactaggaagagagaagaacccagttgcaacactaattttctctttccctttttttggacttatccttctttctgcaactccaaaatgggttccaaaggggcaaaaaatctagcactctcttcagccttgttgctccttttggtcggttttgcaacctcagacatcaatcaagacaaagcagaatgtacggataaacttcttggtctagctggttgtctttcctatgttggtggcgaagccaaagtccccaccatggattgttgctctggtatcaaagaggttattaacaagagcaagaggtgcctctgcatcctcatcaaggatcgtgatgatcctagtcttggcctcaagatcaacgtcacccttgctttaaacttaccagatgtttgtgaaacacccactaatataactcagtgtgttgatcttttgcatttggcacccaagtcccaggaagctaaggtgtttgaggggtttgaaaaagccttgaccaacaaaactagtccctccccggtccttagtgctaataacacaactgcaaagggaacaagcacaagcgcgaacaacaacagcggaggtgggtggggaaagaggtggttagtggcagaggtggtgtgtgtgattttaccgattgtttttatttcccattttttcttgttcctagtttgaaccgtgatcaagagtagaaggatgatgttttagtggttgtgtctatttattatttcccggattcatgacgtgttctgcatatatatatgtttatgttatgcaatttgtgatttatttttaactaggtgttgtactgtccgcgtgccttgagtcattttttgccgctgtgatgaagatggcacgcacaacagagatgaaaacatggagagaattcctggccgtgacagggatcgagatcatggatcggagaaactcaaaacttctgataataagaggcttttggatgcaaaacaattgattgatatgataccaaagaccaaggaggagttgttctcatatgagatagactgggcagcgtatgataagcatcaattacatgatagaatgagaccggggatcccacagaaaatcaaagagttttcgggggaagaagcaacttcattgatagctaaccctgtctcctgatcacatgcacatggtatcgcccctcaactgttttggcaagctcagatgagtctcgcaaatacaggcttaaacttttgaccgggaaaacaattactttagaaattgtaagatctgatacccataa

SEQ ID NO: 7988 - DNA, 1961 bp, Glycine max
  misc_feature (1728)..(1728): n is a, c, g, or t
cccgcgtccggcgaggaaagatacatcttggccaactgggtcgcttccaataccttcagattttggtaggatttcgtgcttttgcataattcgttgagtttctgaagctatggaggcttataagagatgggtgaggcagaacaaagagtttgtgcactccatggagtctttggccaatggattgacatagcttcttcctgaacggttttctgaatcagagattggaccagaagcagtaacaactattctgggaatcatcacagctctcaatgaacatataattgatacagctcctaagcaaaatattacaggctctgtcgagccttattcatttccttatccattatgcttatctgcattaaaggatttggaaacattagttgaagttgtggcacaacaatactatggtgatgataagaaatggaatttccttgccattactgaagcaaccaaggtactggttcggttatctttgtttcggaagagtggatataagatgctgctacaaggaggggaaacacctaatgatgaggagtattcagatagttttacttcacaacatcatatgggcttaaagcccgatgtgcatcataggcctggttatatgaaaaacaatcttggtgcaaaaccaatgaatcaggaaggaagagcattatctgctttggttagatttggagaaaaagcaaaggggtcagatccagtgtggttacgcagggttgaacaccaacaagcaactatggagcctacaacttcaagggtggatagaccaacacttctcaccatattgtctgaaaggggtctttgtggggctctgttttttattggagaagttctacttattagtagaccacttatttatgttttatttattcgaaaatatggtattcggtcatggaccccttggttcctttcgctggctattgattgcataggaaacagtattctttcactcattacatcgtcagtggctggtgggaaggaccgaatgtttcatctgtctgccctagaaaaggatgaggttaaacggcgaaagctgctatttgttctttacctaatgagagatccatttttcagcaagtatactaggcaaagacttgaaagcacggagaaagttttggagcctattcctgtcataggatttctcacagcaaaacttgttgaacttataattggagctcaaacacgatacacttacatgtcaggatcgtgaataaaatccagaacaaatgcctaattgccctccaagattttggaaagatagatattcttactcttcttccacactacctgctgttccaaacttttcaaatgatgaagaggtatcaaacctgctactattatgatttaaaaataacaaaccattgcaagcttgaacttttcttttgcttgacaattccaaacatagaagatgttaagctgcaacccatgtgtgagacaaattgtttgcaaggatagctacactatcaacaactcagtataaattggaatatttatttgggagattttgttctactcctattcacaaaatagaggtgggtgagaattacacttgtagttctgagcatccattggcaggttagaatgtgattcttgaactcagaaaattatattttgttcaaacttattaagtattaagcttattttccatcagcatccatatgtggacaaatgtatattgaattatgcttctttttttttatcaccaaagaaggtatatgaagaaccatntgaagcattaatgctgccaaagttgcgtatttttctttaccagaaccagaacttgtagtatttcttttatttttttggttgtgtccatcaatacctgtacaccaaaattacgtatcttatagttcaatgatactgtaaactactcaatgtctttgtaatagtctagtttggtacgaaaattatatataatactttcgtattggaacaaaaaaaagaaaaaaaaaaaaaaaaaa

SEQ ID NO: 7989 - DNA, 2753 bp, Glycine max
  misc_feature (1128)..(1128): n is a, c, g, or t
ggctcgaggtggctcgagctattattctatctatctattgtttcgttccatctcacaaaaagaaaagaaaaatgaaaatgaaaatgaaaatgaaaatttcaagttcctgaaagagagagagagaaagttgaggacttaaatagtttcagttcctgaattccattagatctcttgcattttgtaaacagttttcatcggaaagttcgttacttgatcgtagtttgttccctcggatcgttgctcgaatgttgtttttttagtgacaaaagaatctggtgtatttatgcttctggttattggatgagctgtatgttttaactatggtgttgaagaagagggtagattatggatttaatggctttcgagttcctgttatacctaaagctcctagatctgccagaaggagggttgctttcaacaaagcagttgaggatggtcaagtttgcgctattgaactactggcatctttagctggccaattgttgcaggagagtgaaagttctgcttccagcaatgcgtctgaaggaaatcatcagcctgccttcagccaaggtgtaattgagcaagatatacaagatgaagttaaaccattaaaaatggaggaaattcatcaggggcacgggggagagagtacttttaagactgaggtagcctcacaaaaaagtagtctcagacctctttcacataccaagactggacatgtttcagttaataatagttctgactgttgtgagaaagctgaagctgatgtgaagtctgaaattttcgaatgggataataaatttgggaattattctaatagattagtagaaacacgtgaaaaatttagggtgtccactcatggtaacataaagaatggatttaaatgggaacaggaggctggaagttcatgcattcggggatcaaatttagctgataagtgtagtttggaggatcacttagaattgtatgtatctcctgcactaattgactcgaaaagtaatattaaatctccatttcataggaaattttttcccagtgcttccttttccaggtatgggaatggcattaagttaggttttagagatgatgacgaaaactttttaaggtgcaaaaagttttgcacgaagccaaaggcttttaggtctncacgacgcattgcacaccgaagaatcaggaatttgatgtcttccaaatactggaagacagctccaaagttgaaggactctgaactttctagatctgaatttgcagatctaggagtacctcgttatcataagaggaagacttgttacggttttgaaagatctcagcacaatgccattggctcgaggaggaaattcgttgaccgggtttcaggagtaacttctgatggaggattcagtagtgagagtgtgtccaattcaccacagaaagggatggatggagacaagcctagctcatctgcaaaattgcatgtacctaaggctaaggattctcatgtaaagtttagcataaagtcaataaggattccagagctttatattgaggttcctgaaacttcaactgttggttcactaaagaggactatcgtggaggcagtgatggctatacttggaggtggtgcacatgttggtgttcttcttcaggggaaaaaagttagagatgacaatagaacacttgtgcagactggtatatcttgcaatgaaaatttggataccctgagtttcatgttggagcccacttcactacaagcttctccaactgtttgtgttggtgatccttcttctcaatgtgaaacatcccagcctaccaggtccacagaaattcctgtcttagattcaggaattactgataccttgcacgactcacccttgctgacatatccgggcaacctaattgaaagtaaccatgagtctacttcttcacttgcggacactacacttgacaaactaacacctgattccagagcgatagttgttgttccagctaccacagaaacattagctgtggttcctgtgagtcagaaaaccaagcgctctgagtttgtacagcgtcgaaccaggagaccattctctgtgactgaggtagaagcacttgttcatgcagttgaggaactcggaactgggaggtggcgtgatgttaagttgcgagcttttgagaatgcagaccataggacttatgtagacttaaaggataaatggaaaacattagtgcacaccgcaacaatctcccctcaacaaaggaggggagagccagtacctcaggagctcttggacagggttttggctgctcatgctttctggtctcagcaccaagccaagcaacatggcaagcatcaagctggaccaggaaccttgaagattacagaagcctcagctgaaagaccttgtgtgtgttgaaggtgagaaggtgtccacttgtgatatgatgatggtgtagaaaggagtggtggtgttgacaggaaaagaggaagacaaaaacttgtacattttgatttgattcaatttcatgtaatattctcacaccaaattctttgccggccattaattgcatgcagggttggcatttgtaaatgatttgatgcaataagattgttctaacaggaacttatgatgttctttgatttttttttcttgatttcttttgcatttatgaatgtttgtagaaatgtaaaaagaacatagaacatgacgacccaaaggaaaaggtgaaaatgttcttgttattatctttcatttcatttatggaaattattgttcccacttgtttgatacttaactttctgtttgctg

SEQ ID NO: 7990 - DNA, 1167 bp, Glycine max
cccccgtcacttcctctctataatctccattctccacacttgactcacttctctacaaccctctcaatattttattatacccaacaaaaattcttcactcactcttaatttcttatggcatcatccgagaacgtagccagcattgagccatgtatgcttcgtccccctgtcaccgattcatggctcgcagagttcttcgctcgtgacgccgatgccttaaccaaggctcttcagaagtctctctccggtactgtcttgccggacgaggaaaactacttttctccctttctgcccaagtcagaccccgccgtcgccacccccaccgtctccagcctctccggctccgatcaggactcggcgccgcgccgccgcgcgccgcttccgccgtccgggaagatctccaagaggaagtcccgcgcctcgaagcgctcgcagacgacgttcatcacggcggaccccgccaacttccgacagatggtgcagcaggtcaccggcgtgcggttcggcggcgccggccagccaattgcgccggcggcgggggttgtgaagcccgagccgcagcgtgcctcgggccttgccaggttccccgccggcgcggggtgcctgccgacgctcgacacgtcggccttcctgctggaccatcaccagcaggtggtggggccctcctctgttaactctgggcctgccaccgggctttctgggcccggcccgctccccttcgcccaacccctccttgacgcttccttcgcctccgcagggttagattttgacaccttctccagcttccccactctcgagtcgtggaaagtcatgtgataaagaaagaagagaaaaaaaaaattgagaatatgagatgagatagattctctgaaaattttctttttactttttccctttttgcccctctcgtgggttaatgaatctagcaggggaagctagctaggatgatcttatgtaaatttgggaagggaaaatggatatggaactagtatctctttttttttttttttctttctgtaatttctgtaacatagttactttcttgttattactattatgaaggggtggagatatggtagctttgtttagtttaattaattaacctaattaatgaaattcgaagtttatctctaaaaaaaaaaaaaaaaactcgaactagttctctcc

SEQ ID NO: 7991 - DNA, 1751 bp, Glycine max
  misc_feature (118)..(118): n is a, c, g, or t
gaaaacattattaattatttaacatggctgatcaaaaatcgtgaaaccgaaagctactagaagcagtaaaaaaaagggaaaggaaagaaaagaagggcgttaggttacagtggcatanagtaagcaaaccatggttgggttaaagcgagtttagcaatagcatcagcttagctcacaacaccgtacggaaaaagtgacgcgtgtcctctcttctcccaaacaacgcgctttccatctctctctactagtccaccgccctatttatcaccccctgcccaacgtaggcccccccctctctataatctcttcactcttcacttacttctccacaatattttatgtattttcgtaacaaaccaaacccaacaaaaacttcttcactcttagtttctcatggcatcatctcagaacgtagccagcattgagccatggatgcttcgcccacctgtcaccgattcatggctcgcagagttcttcgctcgcgacgccgataccctaaccagggctcttcagaagtctctctccggcgctgttctgccgcaggacaaccacctttctccgtttctgcaccagcccgccgccgccgccgccacccccaccgtgtccagcctctccggctccgatcaggagtcggcgccgcgccgccgtgcggcgcctccgccctctgggaagatctccaagaggaagtcgcgcgcctcgaagcgctcgcagacgacgttcatcaccgcggaccccgccaacttccggcagatggtccagcaggttaccggcgtgcggttcggcggcgcgccaattgcgccggcggcggtggtgaagcccgagccgcagcgcgcctcgggcctcgccaggttccccgccggcgtggggtgccttccgacgctcgacacgtcggccttcctgctggaccatcaccagcagcaggtggtgcccgcctctgttaactctgggcctggcaccgggctttctgggcccggcccactccccttcgcccaacccctccttgacgctcacgctgcttccttcgcttcctcagggttagattttgacaccttctccaacttccccactctcgagtcgtggaaagtcatgtgagagagaaaaaaatattgagaatttgagatgagatagattcgctgaaaattttcttttggctttttccctttttgcccctctcgtgggttaatgaatctggacgggggaagttagctagctaggctgatttatgtaaatttgggaagggaaaatggatatgaaactagtatcttttttttttttctctttatgtaatttctgttacatagttcctttattattattattactatgacggggtgtaatggaatggagataatgagagctttgtttagtttaattaaccaaattaatgaaattctaagtttatctatgaacagtggcgcctcgcacccctgctggcggttccgggcaacctaattgaaagtaaccatgagtctacttcttcacttgcggacactacacttgacaaactaacacctgattccagagcgatagttgttgttccagctaccacagaaacattagctgtggttcctgtgagtcagaaaaccaagcgctctgagtttgtacagcgtcgaaccaggagaccattctctgtgactgaggtagaagcacttgttcatgcagttgaggaactcggaactgggaggtggcgtgatgttaagttgcgagcttttgagaatgcagaccataggacttatgtagacttaaaggat

SEQ ID NO: 7992 - DNA, 3881 bp, Glycine max
ccacgcgtccggccagccaacgtggaaggaagccaagaaacctaaatcaattcaaaagcgttgaattttccatttttcccccggtccggatccccgggtcgccccccgcgctctatttactcgctttgcttcaacgccaccaggcctccttcttttctcattaccctagtttttctccattttcttcataattgaaccgtttctcctcgatcccatatgtgttgatagtgaaaggcatcgtcctcatcatcatctatcatggcatggtttagagctggagcaagcatagcaaaacatgcaattaggagaactctttctaagggtggatccacacaccttgtgtcaagggcaagggtccttccatcgataccatcatcacatagcagaagcttccacagctcggttttcaaggagcaagctgcacctgttcctcgtgcggttcctctttcaaagctaacagatagtttcttagatggcacaagcagtgtgtatctggaggagcttcaaagggcttgggaggctgatcccaacagtgttgatgagtcatgggacaatttcttcaggaactttgtggggcaggccacaacctcacctgggatttctggtcagacaattcatgagagcatgaggttgttgttgctggtgagggcgtaccaggttaatggccacatgaaggcgaagttggatcccttgaatctggaaccaagggaaatccctgaggatttggaccctgcactttatggcttcactgaggctgatcttgatagagagttcttcttgggggtgtggaggatggctggtttcttatctgagaaccgccccgtgcaaacccttagatccattttgacaaggcttgagcaggcctattgtggaagcattggatatgagtatatgcacattgcctgatcgtcacaagtgtaattggcttagggacaggattgagacccccacccctacacagtttaatagggagaggcgcgaggctatctttgataggcttgcttggagttccttgtttgagaacttcttggccaccaagtggacctctgcaaagaggtttggtcttgagggtggagagactcttattcccggaatgaaggaaatgtttgatagggcatctgatcttggggttgagagcatagctataggaatggcacatcgagggaggctgaatgttttggggaatgtggtaaggaagcccctgcggcagattttctgcgagtttagcggtggtcttcagcctgagggggaagttggactctacactggaactggagatgttaagtatcatttggggacatcgtatgatcgccctactaggggtggcaagaggattcatttgtctttggtggcaaatcctagtcacttggaagctgtcaatccgcttgttattgggaaaactcgagccaagcagtattacgcaaatgacgtggatagaacgaagaacatgggtgtgttgattcatggagatggaagttttgctggacagggtgtggtctatgaaaccctgcatttaagtgctcttccaaattacactactggtgggacgattcacatcgtgtttaacaatcaggttgcatttacaactgatccgacttctggcaggtcttcacaatattgcactgatgttgccaaggctttggatgctcccatctttcacgtgaatggtgatgatgttgaagcagttgttcatgcctgtgaacttgctgctgagtggcgccagactttccactctgatgtggttgtcgacttggtgtgttaccgtcgatttggccataatgagattgatgaaccatctttcactcagcctaaaatgtacaaggtaatccgaagccatccatcaactcttgagatctatgagaagaagcttttggaatcaggggagttgacacaagaagaaattgataggatacacaagaaggtcacatcaattctaaatgaagaatttttggctagcaaagaatacattccaaaaagaagagattggctttcagcgtattggcttggtttcaagtcacctgaacagctttcacgtatccgaaacactggtgtgaaaccagagatcttgaaaaatgttggaaaagcaatcacaaccatccctgaaaatttcacacctcatagagcagtgaagaggatatatgaacaacgggcccaaatgattgaaactggggaagatattgactggggatttgcagaggcgcttgcttatgctaccttgcttattgaaggtaaccatgttcgattaagtggtcaggatgttgaaagaggaacttttagtcaccgccatgctgtagttcacgatcagacaacaggagagaaatattgtcccctggacaatgttataatgaaccaagatgaagagatgtttaccgttagcaatagttcactttctgagtttggtgttcttggatttgaattgggttactcaatggaaaatcccaattcattgataatttgggaggctcagtttggtgattttgctaatggtgctcatgtcatatttgacaatttcttggcttctggtgaggctaagtggctccgtcagactggtcttgttgtgttacttcctcatggttatgatggccagggcccagagcattcaagtgcaagattggaacgctttcttcagatggctgatgacaaccctcatgttatccctgagatggatccaactcttcggaagcagattcaggagtgtaatttgcagattgtgaatgttacaactcctgctaattttttccatgttctaaggaggcaggtacatagagaattccgcaagcctctcattgtaatgtcccctaagaacctgcttcgtagcaaggcttgcagatcaaatttatctgagtttgatgatgtccaaggccacccaggctttgacaaacagggaaccagattcaagcgcctcataaaagatcaaaatgagcacaaagatgttgaggagggtattagacgtttagtactttgctctggaaaggtttactatgaacttgatgaacatcgaacaaaggttgatgcaaaggatgttgcaatatgtagggtggaacagctttgtcctttcccttatgaccttgtccaacgagagcttaaacgatatccaaatgccgaggttgtttggtgtcaagaagagccaatgaacatgggtggatacacttacattttaccccgacttatatcttcaatgaaagctgtaaataggggaggttatgatgatgtcaaatatgttggtcgtgctccatctgcggccacagccactggtttcctcaaggttcaccagaaggagcagactgagattgctgaaaaagcccttcaacaggaaccgatcgacttcccattttgaaaaggcatttgcacatgcatccatcttttttgagagtgataataatgcatttagtttaatttatccaccacgtaaggagctatagttggaaggaaggtgacttcatacatttgctttcgagttttgaccttttatgatcttttggttccttgcaaaaagtcagctaagctgaatttcaacatgcctatgctgaaaatatttttatttccttgcgatacgcaaaggcgtggttgccttactggttgaattgatgccttggtaattaccattttttttaattatactgtataatttggaaaagcatcttcaataatttgtgactatgtaattccattttccagaggcgtgccttggtagtatagcctcgggatcatggccaacagtttctcgtaattttttttctcaaatatgctttttaataccatcaattcaaaaccaactttgatatggttcttgaatcaatctgagttcatcatcctatgtatctttgtctgataatgtagtcttgatcaatgtatttttgtttattgtattttgctaaaaa

SEQ ID NO: 7993 - DNA, 603 bp, Glycine max
cctacggccgagaagacgacagagtggggtgcaccagactaatgggttctaagagtagtaggtggtcggttacttgggtggttctttttatttgtttgctgttatgtttttctgccaaagcaatagcaacaagaaaccttgctggttatgcagatgaaaagggtccgagtaggagactccttggccgttctccatgcaagaggggaagaatgacttctgaagtggttcaaggagacaggaagcagcaaagggaggacagtccacgttgcaacaattatctgtgatttgcaggctggggttgtttgtatgtgttgcaattgcaaggatcaactacacgaattttttttaataaaatggacacatgagatgtcactgtttgttggtttagtttcatgaaatttgtgttcacagaatttctctcaagaataactttgagatatatgatcaatttaaggatgggtgtgggtaatatctgatttttagaaacgggtataggaatgggtatgtacataccggacacaatatgtataagaactaaattttctttattttatgtaacatatattatttattaaaaaaaaaaaaaaaaaaaaaaaccccaaa

SEQ ID NO: 7994 - DNA, 1837 bp, Glycine max
cgaaaagatggcaaatggattgcaatgataccctgcaccaactctacaaatatgaataataataataagaagaagaaaacagcagcatccataaaaggggtactttatgctggttggttctttccccgtttttatattcctaattatttcccatgtcactatgttgtgcaatgaaagataattaatatcaccacactttgtccacattctcattctcctcactcccatcatcttttccaatggcctccaacggcgacgccgttcatccccacccttccaaaaagatcaaactcttcagcaattccattaactcaactaattcctcgtttatcacccatgccgagatcgaatcggaattctcccaccaccaccccacggtggcgcgcctcaacaacggcgccttcgggtgctgcccggcttccgtgatcgccgtgcagcgcgagtggcagatgaagaacctccggcaaccggaccacttctacttcaacgacctcaagaagggactccttcactcccgcaccatcatcaagaacctcgtcaacgccgaacacgtggacgagatctccctcgtcgacaacgcctccaccgccaccgccatcgtcctccagcaagccgcctgggccttccaggaagcaaaattccagaaaggcgacgtggtcctcgtgctccactacgcctacggcgccgtcaagaaagccatcgaggcctacgtggtgcgcgccggaggcaccgttatcgaagtccccctccccttccccgtcacctccaacgacgacgtagtcaacgaattccgaaaagcccttgagaggggcaagtcccgaggcaacagaattcgcttagcggttatcgaccacgtgacttccatgcccagcgtggtcatccccgttaaggacttggttaaaatctgcagagaggagggtgtggagcaggtattcgtggacgcggcacactcgattgggtgcacgcgcgtggacatgcaggagatcggagcggacttctacaccagcaacttgcacaagtggttcttctgccctccctccgtggcgttcctctacgcacgtgcctcctctaaggcacgtgacctgcaccatcccgtggtgtcgcacgagtacgggaaggggttggccgtggagagctcgtggaccgggaacagggactacagcgcgcagctggtggttccggcggttatggagttcgtgaaaaggttcgagggtgggattgaagggatcagaaagaggaaccatgatttggttgttgagatgggggagatgctggtggaggcttgggggacccaccttgggagtccttcgcatatgagtgctagcatggtgatggtgggtttgcctccttctttgggtattgggagtgactctgatgctcaaaagcttaggacccgtttgagggatgaatttgatgttgaagtaccaatttattttcgtggtggggaagatggctctgttactgcgtatgcacgaatttctcgtcaggtttacaacaaggttgaggactattataagttcaggaatgcggttaatcaacttgtgcaagatgggtttacttgtgctcttctttcggcttgaaattggggtagcctatgctctgctcttagttttaattaactcctcaataacatattcgtccattttatatgtgggatactatttgcaaatgttgagtttgcactttgctgattgcgctattttgcccggtctgttgaaaatttcattgtctatatatccaagtatttgagtggacatttgttgtttaacattttcactactcgtttctgcaatagccaaaaaaaaaagaaaaaaaaaaagaaaaaaaaagaaaagag

SEQ ID NO: 7995 - DNA, 883 bp, Glycine max
ggaacatcgagtccgagaagcattcctatagctagtagcgggaaatcactcttcactctctctgggctatttgctttcttagggcatctccagcaatatggccaaatccactttcttcatctgccttaacctttcattactcttctctctagtcacggccacttactactcaagtttaaccccaacgcttctgggttttcgcgaggagaagttcacccacctacacttcttcttccatgatgtcgtgacgggcccaaagcccagcatggtgtttgtcgccgagcccaacgggaaagcgaaggatgcccttccgttcggaacggtggtggcgatggatgaccctttaaccgtggggcccgatcatgactcgaaacttgtgggcaaggcacaaggaatttacacttcaatatcgcaggaagagatggggctaatgatggtgatgacgatggcgttcaccgatggagagttcaacggaagcaccatcagtgttttggggaggaacatgatcatgagtgaacctgttagggaaatggctattgttggtggcacgggggcttttaggtttgcacgtggctacgctcaggcaaagttttactctgttgatttcaccaaaggagatgctatcgtggaatacgatgtattcgtcaaccattattaagtcctacgtaccccttttatagtggaatacgatgtattcgtgaaataggtgatagctgcttagaacaccttgcataagacttaaatttctttgggtctttgttctaaattccctaatgttattttcttgacattattgttagctagtccctccccctgatgtttccttcttaactttttccttattgttagctagtccctccctaatacaaaaaaaaaaaaacaa

SEQ ID NO: 7996 - DNA, 813 bp, Glycine max
tgccggcacatcgagtccgagagaggttcctacagtagcaggaaatatcactcttcactctcgagctatattttgctttcttagttcccaacaatatggccaaatccactttctttgtctgccttaacctttcattactcttctctctagtcacagccacttactactcaagtttaaccccaacacttttgggttttcgcgaggagcagttcacccacctccacttcttcttccatgatgtcgtgacaggcccaaagcccagcatggtgtttatcgccgagcccaacgggaaagcgaaggatgcccttccgttcggaaccgttgtggcgatggacgaccctttaaccgtggggcccgaacaggactcgaaacttgtgggcaaggcccaaggaatttacacttcaatatcgcaagaagagatgggactaatgatggtgatgacgatggcattcaccgatggagatttcaacggcagcaccatcagcgtgttggggaggaacatgatcatgagtgaacctgttagggaaatggctattgttggcggcactggggcttttcgttttgcacgtggctacgctcaagccagattttactctgttgatttcaccaaaggagacgctatcgtggaatacgacgtattcgtgaaccattattgagatttactccttccgtttcgcaatagttacggagaattgtattagaaaaaaaaactcaaaataaatgttattttaacttacaatcattcaatgaaataactttagtactttttaaaaaaaaaaaaaaaaaaaaaaaaaaaaaaaaaaaacataaaaa

SEQ ID NO: 7997 - DNA, 1155 bp, Glycine max
ctctttggtgtttgggtggcaaaatcagagagagaatagcaataaccggtttgctaatggtgagcagagcacttgttttcttttccacttaggataacagtatttgggatttgtacctgctgaggaaaacggaagtgatgatattgagaaacctggaggcatttgtgcctattattaaagcaggatggaggttttctaagatctactgttttatacacgttacccaaacctatttgatcgcccctgctgtgacctatggtcctagcatgcttcctactatcgatttgaaaacaggtgtgttcttaatggaaaagatctcaccccggtttggtaaagttacttgtggagatattgtagtcttgcgcaatcctcaacaccctaggcactttatgaccaaacgtgtggttggattggagggtgatagcgttacatacatttccaatcctgagaccaatgaatatgagggtgatagttttacacacatttcctctcctgataacggtgataagtctaagacgattgtggtgccaaagggtgccgtttgggttgagggagataacaagtataacagcaatgattcaagaaaatttggtcctgttccttatgaccttattgatggcaagatgttctggaggataacgccacttaaaaaatttggacctttctggaataaatgatctgaagcaaagcattctgtcatggaagctacaatcttttgcagcatggctttgtatgtttaattttgaaaggcaaaaccctacctatctgtagttaattccctagactggggccctttgctccccaaggattcaaattgccccattttgttataagggcagttttgtttttttttttttttttttggccaagcaaattactttaatgcatgaagtaaaagataagtagtagatgatcataagaatctactcagatattagaaatggaacatagaattttctgttgtttgagcacatccctaatatctcttgtatggttgttcaattggctttgatggaagaatttatgtaatcctattgaaaacctatggccttttgaagaggggtcttcgactataaaggcccattgcattgctgatatatgatatgctggtttgttggttggaaaaaaaaaatcacttaaactaaaggggggggc

SEQ ID NO: 7998 - DNA, 2037 bp, Glycine max
  misc_feature (2020)..(2020): n is a, c, g, or t
tcggccacctttcttctccttttttcgacctcctctacggttccgcctcttcactgctcttcctcttcgattagggtttcattttttcaacccgatctatattgcgttgccgcagctattccttcctctcttcgattttttcacttctcgctcttacacgatcttaagcttcgaagtattacaagtttgcttcattgctatgtggtgccacttggcttatcaccggcaaccacctggttatcctgtgtaaaactccatggtaccagagggctagggagtcatgggctgctctcaggatgctaatttttataggggttccttgtgctgtcagctaattctatttttcatctggcttcctactttccaatatgtgacagcacgggaaatacatgctgaccatagaagaatttctactctggtagagttagctaaggaacctgcttctggagaatctgggctctttgaccccatagaaatatcacctgctgtattaccaaaattcccatatcccactgagtcttggccacccatgtaccctaccttcccaaccagatatgaaccagttttaactggaaaatgccctgtaaacttttctcactcaggtatatcaagtatcctagataaaacagcatctgattgctctggacctttggcagcccttgttgggaatgtaatatgttgtcctcagtttagtagcttgatccacatcttccagggtttcttcagcatgaaatctgatcatttggttttgccaaatgcagttgctgatcattgtttttctgatatcattagtattctagccagtagaggggcaaatagtacaatccccagactttgttccataaaatcatctaattttacaggcgggtcatgtcctgtgaaggacgattctacttttgagaaaacagttaactcaagtaagttacttgaggcttgcagcactgttgatccacttaaagagtgttgcaggcctgtttgccaacctgcgataatggatgcagccttacagatttctggaagacaaatgatgattaacaataatgaaaatatggccggggaagtgaatcacactgattatcttaacgattgtaaaagtgtggtttattcatatctttccaaaaaactatcatttgaggccgcaaatactgcattccgtatactatctgcttgcaaagtcaacaaagtttgtcctttgacttttaaggagccaacagaagtaattaatgcatgttggaatgtagctgcccccagcccttcctgttgtagttcattaaacacatatattactgggatacaaaagcaaatgttaattacgaataagcaagctataatatgtgcaacactttttggatctatgttacgtggaggtggagtgatgacaaatatttatgagctttgtgacgttgatttgaaagatttcagcatacaagcttatggacaacaaggctgtttacttcgaagcttgcctggagatgtgatatttgacaattcatcaggctttagctttacatgtgatttgagtgataacattgctgcgccctggccttcttcatcatcttcatttgcatctatgtcactctgtgcacctgagatgtcattacctgctctcccaacatcttctcagacactaaaaaataatggttgtaattctggtggagtgggattgcttctgcttattttttcatttttcatcttcagtacactgttgtattgaagatattttagggtttagatatgtgtcgggaaggcatttcaaagtgtctttggtgtggcttttgcatgtatatttttgaacggcctcattgtatagaaatctcccttccccttttccacgtgtcttctgcttgtatgttctggagttagtgctcatttgatttaggatccgtgattgtgctgtgaagggttcccttattttgtgttgaaatgcagacacgcagatgctagattagccgctaaaaaaaaaaaaaaaaaaaaaaaaaaaaaaaaataaaaaaaaaaaaaaaaaaaaaaaaaaaaaaangaaaaaaaaaaaaaaaa

SEQ ID NO: 7999 - DNA, 1526 bp, Glycine max
tgcagcgctaacagcaggctctttagtgatgggtctcagataaggacgcgtatcatcctccacatttctcatgtcttcaaaccgggtactcttattaaatataggccggctccacttatcaaccagctccttggctagtttcctattcacattgatttcttcatcagacttcgatagaaacataatgaccttcccaagaccactcttcttcagctgttctcttctatcatactgctctagatctataggaaaatcattcaatatcttcaaaacttctgtgcgtatatttatatttggcaagcttccatcaggaagtggctcaagccaattcttcaataaagttagcactccatgatctaaaaactccagttgaagctgtttctttgagaggacttctgtaagaagattcaacttcttgagtttattaacggcaggcttcccctgtctattaagttcagcatcctcctcagctgtaacctcaagctcagccatgacagtctcaactaaataagctatttctgcaggacttctctcattcttcttctttttcttacctatcttgaaaagatccttaatttcttcgtcctcttcaccctcctctgcctggggagcatcaccaggagaacgtggttcatcactaccataataagcaggttccactccagtgtcatcaataaagttgtcatcatccacattcctgagaccctcttgatcatcctcagaatctcccccagcaattgtatcccacatctccttaacttcaccatcatgatccttccctgccttcccaccaaaccctttctttccactcccaaatttggacccactcttcccaccgctgctcccaaaactcttctcccccttcatcctcttctccttcttcccactcccaccctccttccccttcttcctcttccttccagtgtccgcctcgtcgaacatcgcctccggaacatacccctccacgtcctcatcctcaagctccggctccaccgcctgcttcccggcgtcgctcttcttgatcagcctcttccgcggcttcgaccgcgacggatcggtgtcatagaccggcgtctgcgaccgatcacggccgcgccactcgtcgacgtcctcatcgaaatcgtcgtcctggcggcgaggctcgggagatggctcgcgatcggattgaatgtcgtcgtagtccatcaagggctctccgtcctcgtcacgatacggattgtcttcgtagcccatggttggtgtgtgttggaaattggaaaaggtgtttgcgaatgaattggtagaaagtgaattagggtttgtgtttgaaagtgaagagagaaaaagaagaatataagaaagaggaaatgtttgaatggacgtacggaaaggggtgacagtttgagagggagggagggtttgtcgaaaacaaaggaggtcgggaagatacggacggagccgctccggaacttatacgctgctgctgggttttattgcctcttgggccccaacttcattgaaaaaagttttaattactcggtctttat

SEQ ID NO: 8000 - DNA, 953 bp, Glycine max
  misc_feature (869)..(869): n is a, c, g, or t
  misc_feature (883)..(883): n is a, c, g, or t
aaaaaaaaaaataaaaaactttgccgcacaatcggcgagtttgataaaacaagcttgattattcaattgaaaaataaaaatcttaaaacatgtacacaaccgtccagtgtattttggttggtattactgctgcagcgctgcactacaaagattacttgtaccaaggacgaatgcaaaatccacattttcattaaactgatgacaagcttgactatatatacgaatgcataaccgtccaatgtattttggatttcctgctgcactagatgaatacacaaatgcagcatacggatgtattttcataacatccctctccatcaaatttccatgtagatcactgaacgaatagcccacctttagaagaatccacatcaatgcaggcagcacattatatgaaaagcttgcagcaggacaaacaaacccatccagtatcaacgtggtcacatttataaatatttgatcataccacgaccttccacgctcaattttgtagcctgaagctgcttcttttttggtgccctcaattgctgcaatttcttattcatcttcatacgctgctgatcttgtgcagcttgttttgctcgtgctctaatttcttctggatcaattttagactggggccggaccacaaaatccaaaggtgttgcttccggccttgatgcatgctgcctagaagaggactgtccagacctaggctgtgaaagttctaaatcaagatcactgtctctagattccattcctgcagctttatttgccggctttttaactgatggtctcctataaggaaccctatcatcctccacatttctcatgtcttcaaaccgggtactcttattaaatataggccggctccacttatcaaccagctnccttggctagtttncctattcacattgatttctcctgcccccgccgttagaaacataatgaccttcccaagaccactcttcttc

SEQ ID NO: 8001 - DNA, 1145 bp, Glycine max
ttttttttttttttttagggaaaatccacatattcattaaattgatgacaagcatgatgattattcaacagaaaacgaaataatagacgaatgcataaccgtcaaatgtattttgggtttcctgctgcactaaatgaatacacaaatgcagtatacggatgtattttcatgacatccctctccttcaaatttccatttatcgagctcactggatctccaccttcagaagaatccacattaatgcaggcagcacattatatgagagcttgcagcaggacaaacaaacccgtccagtatcaacgtggacacatttataaatatttgatcataccacgaccttccacgctcagttttgtagcctgaagctgcttcttttttggtgccctcaattgctgcaatttcttattcatcttcatacgctgctgatcttgtgcagcttgttttgctcgtgctctaatttcttctggatcaattttagactggggacggaccacaaaatccaaaggtgttgcttccggccttgatgcatgctgcctagaagaggactgtccagacctaggctgtgaaagttccaaatcaagatcactgtccctagattccattcctgcagatttatttgccggctttttaactgatggcctccgataaggaaccctatcatcctccacatttctcatgtcttcaaaccgggtactcttattaaatataggccggctccacttatcaaccagctccttggctagtttcctatttgcactgatttcttcatcagactttgataaaaacataatgacctttcccagaccactctttttcagctgttctcttctatcatactgctctagatctataggaaaatcattcaatatcttcaaaacttccgagcgtatatttatatttggcaagcttccatcaggaagtggctcaagccaattcttcaataaagttagcactccatgatctaaaaactctagttgaagctgtttctttgagaggacttcagtcagaagattcaacttcttgagtttattaatggcaggctttccctgtctattaagttcagcatcctcctcagctgtaacctcaagctcagccatgccagtctcaactaaatacgctatttctgctggacttctctcattctt

SEQ ID NO: 8002 - DNA, 2096 bp, Glycine max
atctcccaatccaatcaatggcttcttctctttccccttctccctcttccctcgaccaaacccttcgcgacgtcgacgactacgttctggaaaatgggtcagaaggtttgtcaagggacacacttcattatgtgtacgagcttgtgaagaatgggaatgtggcatttcgagagaacagaatggaagaggcaatcaacttttactcaagagccaataacatcaaatcaggatgagccaatcatcctcatgcactcgaagtgcagctgcgacgaggcccggatgccggctcggaatattcatgcacagaacaccatcatcttcagaacgtaggccattgagtgggcttgaacccacaacacttgctgaactgggtttgaaggatgctgagaagcttgttgaactccaaagtaattcagcaaaatcatatcttttaaaggccaatgcttttctactgttagagaaatatgaaaaagcccgggatgttattctttcaggccttcaagttgatccttttagtaattctcttcgggcttctcttcaaaatttggaaagtgtttcatctagttcaagagggatgagtacacatggacatccagaacgtaatgatgattttgattgcactctctgcctgaagttactgtatgaacctgtcacaaccccgtgtggacattctttttgctgttcgtgtctatttcagtcaatggatcgtggaaacaaatgcccattgtgcaggactgttctgtttattagtcctagaacatgttccatcagtgtgacattgaagaacatcatacaaaagaatttcccagaggaatatgctgaaaggaagcaagagcacgacagtttaatcaaagctggtgtagatttactccctctttttgtcatggatgttgtcataccatgtcaaaggtttccactcaatatatttgaacctcggtatagactcatggtaagaagaataatggaaggcaatcatcggatgggaatggctatacttgattcaacaggttccttagctgagtttgcctgtgaagtggaaatcacagagtgtgaaccacttccagatggtcgtttttatatagagattgaaagtcgcacgagatttcgtatcatccattcctgggatcaagatgggtatcgtgttgcagaggttgaatggatacaagatattatgccaccagaagggacaagtgaaagagatactttacagcaacagacatataatgcagtcgaagatgctagatcatggatagcaagagctaaagaagcagcaagacatggtaatttttaaactataattatatgatgtttacctaggactactttgtactttggtgatagtgaaacccaagatatattggtaatttttaaaccatcatcagatgatgtttacctactacctaggacttctttgtactttgattataatgacaaccaagatatattggtcatcgcctttttcttttcccattttttttgggggggttgctgaacatatatttccagcacttataggaatctgttaattctgatgatgctttagtttttgttatcctatgtttctgaatgggagtgacctttttcctctttgctcctgtaccagcgacactggactgctgcaatactaaactactggaatatcatacagatcaaagaaaacttgagagactcgccagtgttgaagtaatgatgccctcaccaaaagaccctgagcgctttagtttttggctggctactctttccaatcggaggcctgcggaaagattggatctcctacgcataagagacactgccgagaggattagacggggcctgatatttctccgccaggaggaacaagggtgcagaattcagtaagacaagctgaggagggctgccactattattgcaattgaatatttgtttattgcaaattcatttagaagtctttcaacattcttcggcctcataaacaaccgttgatgaggtcatttttgctgtaacatagggttgaacagtttttctaatatatataatcatctacaacacattttttattggccaaaaaaaaaaaaaaaaaattcctgcggcccgaattcctggtgccgaattcttgg

SEQ ID NO: 8003 - DNA, 1506 bp, Glycine max
gcgttcacgcgtgctcccacgatctcttcgctaattcaaatttcatttcgtcaatcactcctaacttctgcattccaaaaatgaactcggacacgacgtcgtattggtgctacagttgcacgcgcttcgttcacatccacgaccagaacgacgtcgtgtgcccccgctgccatggcggcttcgtcgaaaaggtcaccgccgggcaatcggcaaggcaggggttccgccgccgccgccgcaacgccgggagccactcgccgttcaacccggtgatcgtgctccgtggaccgggggaggacgaggagagcagctttgagttatactacgacggattcgacggcgaggggctccgcccgctgccgtccaccatgtcggagtttctgctcggatcgggattcgaccggttgctggagcaggtttcgcagatcgagataaacggcttgggaaggccggagaatccgccggcgtcgaaggcggcgatagagtcaatgccgacgttggaaatcaccgagtctcacgtcgcgtcggagacgacctgcgctgtgtgcaaggaggccttcgagctaggcgagttggcgcgtgagatgccgtgcaagcacctctaccactccgattgcattcttccatggctctcgatgcgaaactcgtgtccggtgtgccgccacgagttgccgtcggagcaagccgcgccggaaaccagagtcgccggccagatcgaggaggaggcggtaggcttgaccatatggaggttgccgggcggcggattcgccgtcgggaggttcgccggcgagagccctttgccagtggtgtacacggagatggagagtggcgggaactccaacgaaggttctcgaagaatctctctggctgttggaggcggcagagttagggaaagtcgtggtggatttgggagaattttccgcaatttgtttgggagaattggggctttgactagaagccgtagcctttcaacttcactcttcaatagaagaagaagtactagaacctgggtcttgggaaattgatttggatggagttggttttggaaaacaagctttcaatttgagattcttattgtaaatgggcatagaactgattcgaaatgtctttgcattttgcgttatatcaatagatgtttttctccagacacgattcaccgaaggggactcgagagaaagattattcttgcagtagaacatacgttttgggggaagaacccaggctgtaattgcttgatttgtttaatgttcatatagtatgtgctcgccgcaaattctttgatgaaaggagatattgatcgttattattccaaaattcagcagaacaaaagggaataccgaatctgtgtgccatattcgcggcattcattctactcttggagctaactttttgctggtgctgatgattattggaattatggtcatgttggcctgttggcctgatgatgatgatgacactttgcatatcatgcgtttcatctttcatgaatgaattaattttttaatc

SEQ ID NO: 8004 - DNA, 560 bp, Glycine max
acgaggtaacaggtaagattctcctaatgaaatgtataaaaaaataataagaaagttgttttagtgatctatgtcgccatagctaaagggatcatagtgacaactgtgggtgagacgaaggtatgggagacgtattctacggcaacgatgaccaccgagaaatgaacgatgattgtatgtataaggaggatgtagtgatggagagcatcagaagccaacgggaaatcaaagacctcaagcgcagacaaaacaacaacaactgctgctacttctacttccttcgatgctttcactttctcacgcttctccctgctttcgtcaacttctgatgtaacctactatttgtgttatgttatcaattaactcttgaaagtttttattcccaatctagatcaaatactgtgttgcagtattcatttttattttctttggtctcaaccctctgtttttcattgatttgatataggcgcaataatgataagagtttaattcttttttgttatcatgccgagcttaataccactttgagtaacaatttattgacaaaaaaaaaaaaaaaa

SEQ ID NO: 8005 - DNA, 1825 bp, Glycine max
gctcaaacccaacagaagaagaaagaaaccctcactttactttacttccattgcattcacattctcattcttcagctcgccggtgacaccttcatcgttttccgccatgtcctcctattccgcacaaccttagattgccgtcaatctctctcacctttttcccttctttcaacagaaaaagagagtcagcgtcggtggccccccccccttttttgaaaaaaacgatacggtatgtacgtggtgcctccaccccagcgttcggatccgggttcgggatccggtgatttgcgggtctaccaagcgtggaaggggagcaataaattttttcttcagggaaggttcatatttggaccagatgcaagatcattggccctgacgatttttcttattgctgctcccgttgcagttttctgtgtctatgttgccagaaaactaatagatgatttttctgatcacttgggggtaaccataatggccattgctgttatattcacaatttatgtgttagttcttctcttgttaacatctggacgagaccctggcataattccacgcaatgcacatcctccagaaccagaaggttttgaaggtagtctagatgttggggctggtcaaactcctcaattgcggttgcctcgaattaaggaggttgaggtcaatggaattactgttaaggtcaagtattgtgatacttgcatgctctacaggcctcctcgatgttctcactgctcaatttgtaataactgtgtggaacggtttgatcaccattgtccctgggttgggcagtgcattgggctgcgtaattatcgcttcttcttcatgtttgtcttctcaactacactactttgtatatatgttttcgcattttgttgggtctatattagaagaattatggaggcagaggagacaacaatttggaaggcaatgatcaaaaccccagcctccatagtgttaataatttacaccttcatatcaatgtggtttgttggtggcctgactgcctttcatttatatcttataagtacaaatcagactacatatgagaacttcagataccgatatgatcgacgggccaacccgtataacacaggagtgttcaataatttcttagagatattctgcaccagcattccccaatcaaagaacaatttcagggcaaaggtaccaatggaaccagtattacctgctcgatcggtgggtgcaggctttatgagcccgagcatgggaaaagctgttgacgacatagagatgggcaggaaaaccgtgtgggccgacatgggtactgctcttgatccttctgaaggtcaattaaatgatcgcgtggctgtaaaggatggggaatttggtgagttgtctccagaaattaggacaacagtagacgaaactagtcaccgtgccggaatgcatcccaggagatccagctggggaagaaaaagtggaagctgggaaatgtcccctgaagttcttgctttggcagccaaggttggggaatcaaatcgaatgggtggaggtagcagcagtttgaccactgagaacaggcatacatagccactgaaattatattagtctggcaaagggttttatttgttgtaattaaacggtgttacatttctgatgcagcaaatcatcagcaaaattaattgtatttgcaatgtgggggatgagggctttggagggtgtttgttagtgttgttttcgccatattgtgcttctagggagttgttgtgttgttgtgagtgagcttttttcctttgccttgtgttgtatcacgcttcccaattaactatttgtcttaccaattaccaataaaaaaaaaaaaaaaaaa

SEQ ID NO: 8006 - DNA, 1804 bp, Glycine max
tacggctgcgagaagacgacagaaggggggagcaataaattttttcttcagggcaggttcatatttggaccagatgcaagatcattggccctgacaatttttcttattgctgctcctgttgcagttttctgtgtctatgttgccagaaaactaatagatgatttttctgatcacttggggataaccataatggccattgctgttatattcacaatttatgtgttagttcttctcttgttaacatctggccgagaccctggcataattccacgcaatgcacatcctccagaaccagaaggttttgaaggtagtctagatgttggggctggtcaaactcctcaattgcggttgcctcgaattaaggaagttgaggtcaatggaattactgttaaggtcaagtattgtgatacttgcatgctctacaggcctcctcgatgctcgcactgctcaatctgtaataactgtgtggaacggtttgatcaccactgtccttgggttgggcagtgtattgggctgcgtaattatcggttccccacgcgtccggtcttctcaactacgctactatgtatatatgtttttgcattttgctgggtctacattgtaagaattatggcatcagaggagacaacaatttggaaggcaatgataaaaactccagcctccatagtgttgataatttacaccttcatatcaatgtggtttgtaggtggcctcactgccttccatttgtatttgataagtaccaatcagactacatatgaaaacttcagataccgatatgatcggcgagccaacccatataatgaaggagtgttgaataatttcaaagagatattctgcatcagcattcccctttcaaagaacaattttagggcaatggtgccaagagaaccagcattacctactcgatcagtgggtggaggctttatgaaccaaaatatgggaaaagctggggaggacatagagatgggcaggaaaacagtgtgggacatgggtgctggaatggatgataacggagctccaataaacgatgatcgtgtgactataaaggatggcgaattgtctcctgaaattaggacaacagtagatgactcggaccgtgctggaatgcatcctaggcgatctagctggggaagaaaaagtgggagctgggaaatgtcccctgaagttctggctttggcggccagggtgggggaaccaaaccgtgtcggtggaggcagcagtagtttgatgcacgagaacagtcatgtgtaagccattatgcttcaagtagtgtgaccaaaggacttgaaatttgatttcacggttataatgaaaaaaatatattacactgttcatgtggtgattctacagcaaaattatgtgcaatatggggttgtaggcatttgcaaggtgtttgcaagtgtttttttaggcattctgcttctaagaagaaattgtttggtgttctgagagtgagctttgctttgctttgcttgatatgttgtattatgcaattaattagcctctgcactagtggaagttgctgcagctttctctgtggctgaatgccagtgacttggagtattgggaatttgtccaggaggaaatcaatggtggatcaagctgaattgttcttgctaacttacctcttatgcttgaattaaatgtagttggtgtgttagggtgagaaacttgttgagatgaatttgccatgacaaaattctttactctctatactactatagtgttttgtgcattctactttaaagtaggaacattgtgtatcatgtataatcccataatgtttgtgttactaaaacaa

SEQ ID NO: 8007 - DNA, 1003 bp, Glycine max
agaacattattgcacccatttctgagctggcattggagaaagaagaattgataaaagccttgacatctgaatcatctgagtgttccaggatgaaggaaataaacaaggagttgtcccgaaagcttgaggtccagacacaaagattagagcttttgactgctcaaagcatggtcaatgaaaatgtttctgcaaagcaaccagattctcgtgctatgtatgagaacaccccatatgcagatgagggtgatgaggtcgtggaaagggtgttaggatggattatgaagctctttcctggtggaacttcaagacggagaaccagcaaacttctttgattggatttacattagacttttgtatttgttgtcaccaaagtcttactcaactgttaggatggggacgcgtggggtttcctagtatgcaaggtaaagaatcagcaaatttcaaccccggatccacgagtaacatgttgacaaaagtctaccgagttgcattttgttcttgtaacctcctcaacccactggaggtcgtgatctgtaaattttgagtgaattatacaacaaattcttgaaaaagaaatgattttctcttctgagctgctgcttattgatcgatgaatccagctgcaattattttcgaagatggcaataaaatctcttctgcggtgttatctctttgactgaattccaaattttgtaagtataatagttggctatgaaagagactgtaccaagaagcatagtgtgagagtcagagatcagttgttaagtatgagatgtgagaacatttgttgaatgtatattgctaaatagaagtgcaaaagatgattatagatacataattgatttatttttaagtgcttcaacttcaaatcactcatgaacattatatttgctcagtagtgaaaacagcatttacccattatgaatgggaagagagtttgtgttgacaagatgacatgtataagtcatcaatttgtattctttaaataagagttattgtttcc

SEQ ID NO: 8008 - DNA, 2445 bp, Glycine max
tgttatccacgccagctgcatctgcttttttttgtgattccctttggttctggggtggaatctacgtataaaagttgatatcttggtttcgtttcttggttgaggagaattgtttggggctgtcttggtgttgggctggtcctgaatttttttaatgcctttttggttggtttctagttttttttttttttaaagtgcgtactaggaactctctctctctctctgggaattgggtgcttctatttgtttaatggaagattatttatgggtttagattattgggtttaacagttcatgcctagtcaccaatacgcgtctggtatacggattgaaatctttctttcttcttttgtgcaaatttgcttggtctagcagccatatctgcatctggttttgcgcgtgtacacccagacattctcgctgatctagttgggataaagtgtctctttatattgccaagaagagtttactgtgtgggaggagtgttttatgtttgaggtcttatatacttgtgagtaatgaacgtgtgggatgtgcgttgtggggtgggggagtagggtgaaggttctttggtggggctagatatggcctctggtgaagggaggcggcgtcatcatgatcttgtgcctcttgctgcattgctcaagagagagatgaagagtgagaagatggagaagcctactgtgagggttggacatgcagctcagtccaagaaaggggaggattactttctaattaagactgattgtcaacgagtgcctgggaactcttcatcttccttttctgtatatgcggtttttgatgggcataatggaaatgctgctgccatttttactagggagcatttgttaaatcatgtgttgggtgctcttcctcgagggcttggacgagatgagtggttacaagctttaccaagggcattggttgctggctttgttaagactgacaaagaatttcagagcagaggagaaacttcgggaaccacagctacattcgtaatagtggataggtggactgtgactgttgcatctgttggagattcccgttgtatactagatacccagggtggtgctgttacctccttaactgttgatcaccgacttgaggagaatattgaagagagggaacgtgtcacttctagtggaggtgaagttgggagacttagcattgttggtggggctgagattggtccccttcgttgctggccaggaggtctatgcctttctaggtcaataggtgacatggatgttggggagttcatagttccaataccatatgtcaaacaagtaaagctgtcaaaagctggtgggaggcttgtaattgcctctgatggcatatgggatgctctatcatcagaaatggctgcaaaatcttgccgtggtttgcctgctgaacttgctgctatgcaggttgtcaaggaagcactaagaacgagagggttaaaggatgatacaacttgcatagtagttgacattatcccacctgataatgaattgccaccaacacctccccccccaaaacggaacaagctgagagatcttctttccttcaggaagaggtcccgtgattctgccagtaagctgtcaaaaaagctttcagctataaatatagtggaggaactgtttgaagaaggatccgcaatgcttgctgaaagattaggaaatgatgacaacttgaactcagggcaatcaacatctggcatttttgtctgtgctgtatgtcaagttgatcttgctccaagtgagggcatctctgtccacgcaggttctattttctccaccagctccaaaccctgggaaggtccttttctatgttttgattgccgtgataagaaggatgctatggaaggaaaacgcccaagtggagttaaggtgtcataggctcaaaattggtgtgctattctagtattctatatgctatctttggccatttttgtattcacgatttttataggcaaaaattaattgattgaatctcactatcaagtagcaacagctgtatatgtgatattcacgaattcatctaaaatgggcattgcatttgagtagcaaattaaggctggggagagtgcctggaatgggtttttgtgcggctcaagattcttcatctctgatttggatggtcgggtagattcttttgtatagtatagtttatgttgcctaacttaccacaaaagtaggtattttcttgattaagtatgcagcactgcactctacttcctccccaaattctgtatataaatttccatggaccttttctacccctggggattagaagcttcaaatctctactatggattgaaaagtcaattcatctaactttagaaactgctcgttaaatgtttcctttttcctgtgtcattttggtctcactcttatgtttgtcccttttaggagggcagtgtttctgtccgtttcaaatagctgaaaggataatgtaatgatt

SEQ ID NO: 8009 - DNA, 810 bp, Glycine max
  misc_feature (24)..(24): n is a, c, g, or t
  misc_feature (42)..(42): n is a, c, g, or t
  misc_feature (44)..(44): n is a, c, g, or t
  misc_feature (612)..(612): n is a, c, g, or t
aaagattttgatttggtgatgaancgttggagcatttcactncngttatataaaaggcgtggcttgtgggctgtgtagaactcaaatcgataatcgaaaataaatggcaactgaacatgaagacgatttcaaggatgagaagaatccccgccccctcgacgaggatgacatcgcccttctcaaaacctatggtttggggccttattccaccagcataaaaaaagccgagaaggaaatcaaagaaatggcaaaaaaggtcaatgatttatgtggtatcaaggagtctgatactggtttggctgcaccaagccagtgggatcttgtttctgataaacaaatgatgcaggaggagcagcctcttcaggtagcaaggtgcacaaagatcataaacccgaactcagaagatgccaaatatgtaatcaacgtgaagcagattgcaaagtttgtcgttgggctgggcgacaaagtttcacccaccgacattgaggaagggatgcgtgttggggttgatagaaacaaatatcagattcaaattccactgccctccaaaaattgacccaagtgttaccatgatgacagttgaagagaagcctgatgtgacatataatgatngttgggggttgtaaggagcagattgaaaagatgcgagaagttggtgagcttcccatgctccacccttgagaaatcggtaagctaagaattgatcctcccaagggtgttcctttgctatggcccaccaggaactggcaaaaccacttttagctaaggctggggctaaaaggactgatgctttgtttaaaaaagttattg

SEQ ID NO: 8010 - DNA, 869 bp, Glycine max
tgacggctgcgcttaattcaacgccgggtatcgcttctcttctcttcaaagtgaactttgcaactttgagcagaaaatctcacagtcgaaggaagaaataatcaccaatggcaattgaacacgaagacgatctcaaagacgagaagaaccctcgacccctcgacgaggatgacatcgccctcctcaaaacctacggtttgggaccttattccacaagcataaaaaaggcggagaaggaaatcaaagatatggccaagaaagtgaatgacttatgtggtatcaaggagtctgatactggattagcagcaccaagccagtgggatcttgtttctgataagcaaatgatgcaggaagagcagcctcttcaggtggcacgatgcacaaagatcataaatccaaactctgaagatgccaaatatgttatcaatgtgaagcagatagcaaagtttgttgttgggctaggagacaaggtttcccccactgacattgaggaagggatgcgtgttggggttgatagaaacaaatatcagattcagattcctttgcctccgaaaattgatccaagtgtaaccatgatgacggttgaagagaagccagatgtgacatataatgatgttggcggttgtaaggagcagattgagaagatgcgtgaagttgttgaacttcccatgcttcatccagagaaatttgtcaagcttgggattgatcctccaaagggtgttctttgttatggtcccccaggaactgggaaaacacttttagccagggctgtggctaataggactgatgcttgttttataagggttattgggagtgagctagttcagaaatatgtcggtgagggggctaggatggttcgtgaactatta

SEQ ID NO: 8011 - DNA, 1635 bp, Glycine max
cggccgctcgaggcggcgggtacaacttcaattgaatacttgggcatcgcttctcctctctcccaagaaagaatcatcaatggcgattgaacacgaagacgatctcaaagacgagaagaaccctcgacctctcgacgaggatgacatcgccctcctcaagacctacggtttgggaccttactccacaagcataaaaaaggcggagaaggaaatcaaagatatggccaagaaagtgaatgacttatgtggtataaaggagtctgatactggtttagctgcaccaagccagtgggatcttgtttctgataagcaaatgatgcaggaggagcagcctcttcaggtggcaaggtgcacaaagattataaacccaaattctgaagatgccaagtatgttatcaatgtgaagcagattgcaaagtttgttgttgggctaggagacaaggtttcccccactgacatagaggaagggatgcgtgttggggttgatagaaataaatatcagattcagattcctttgcctccaaaaattgatccaagtgtgaccatgatgactgttgaagagaagccagatgtaacatataatgatgttggcggttgtaaggagcagattgaaaagatgcgagaagttgttgaacttcccatgcttcatccagagaaatttgtcaagcttgggattgatcctccaaagggtgttctttgttatggccccccaggaactgggaaaacacttttagccagggctgtggctaataggactgatgcttgttttataagggttattggaagtgagctagttcagaaatatgttggtgagggggctaggatggttcgtgaactatttcagatggctcgttcaaagaaggcatgcattgtgttttttgatgaagttgatgcaattggaggtgcacgatttgatgatggcgttggtggtgacaatgaggttcagcgcaccatgcttgaaattgtgaatcagcttgatgggtttgatgctcggggaaacatcaaagttttgatggcaactaacaggcctgacactctagatcctgcactactacggcctgggcggttggaccgtaaagttgaattcggccttcctgacttagagagtaggactcagatattcaagatacacacaagaaccatgaactgcgaaagggatatccgatttgaacttctggctcggctttgcccaaattccactggagctgatataaggagtgtatgcacagaagccggtatgtatgctatccgtgcccggaggaagactgtaacagagaaagacttccttgatgcagtaaataaagtcatcaaaggataccagaagttcagtgcaactcccaagtatatggtctataactgagttattctttcatcttcttttcccgagaccatagtagaacgtacaatctttattttcccctgaaaattgaatggcatgtgattctttctatttaactcctgtttgaatgcatccttgtagcaaacctttccttgatgttacatccaaaattgtgagcaaaaccttcttttagcccttgaagaatatacttattattatcaatggaagttgttcgtcatttgcatggagggaagttgttaaaaaaaattttttaaaaaaaaaaaaaaaaaaaaaaa

SEQ ID NO: 8012 - DNA, 775 bp, Glycine max
gcatgcatgtgttttttgatgaagttgatgcattggaggtgcacgatttgatgatggcgttggtggtgacaatgagggttcagcgcaccatgcttgaaattgtgaatcagcttgatgggtttgatgctcggggaaacatcaaagttttgatggcaactaataggcctgacactctagatccagcactactgcggcctgggcgattggaccgtaaagttgagtttggccttcctgacttagagagtaggacgcagatattcaagatacacacaagaaccatgaactgcgaaagggatattcgatttgaacttctggctcggctttgcccaaattccactggagctgatataaggagtgtatgcacagaagccggtatgtatgctatccgtgcccggaggaagactgtaacagagaaagacttccttgatgcagtaaataaagtcatcaaaggataccagaagttcagtgcaactcccaagtatatggtctacaactgagttattctttcatcttttcccgagaccatagtagctttatctttattttcccctgaaaattgaagggcatgcgattctttctatttaactcctgtttgaatgcatctttgtctgtagcaaacgtttccttcatgttacatccaaaattgagagcaaaaccttcttttagccttttgaagaatatacttgttatcaatggtagttgttcgttattggggaaaaaaaaaaaaaaaaaagcaaaaaaaaaaaaaaaaaaaaaaaaatataatattttttta

SEQ ID NO: 8013 - DNA, 777 bp, Glycine max
  misc_feature (1)..(5): n is a, c, g, or t
nnnnnaaaatggtcttattcgaatatgtttcgtctcttaaaagttgaaagtaagacaagatcgaggaatgatatatatcagtgatagaaaatccaatatgtcattggacaaccaacattattattataacattatggagatgcagatcatcatcatcctagtataaagtatactccctagtgggatccagacaatggaagaaattaaaccatctttattctctctttgctgattattactgcgaaacaagtttaaagtcaacaagcataaaccctcgtgcaactgctcagtgctttaccgtgttgcaatcaatggtgggggatatcttgtagggcaagttgaccccgcatttgctagggagagctgcaagggttgcaaggttgagtccaggcaagctcaaagcagtggttttgaggcacctacacaccccttgacgatctggggtggttttggcttccttgtttatgctcctaaccccattgcagcatgctgcagggacacctccaccaggaccccttaggtaccctatgcatggagccactgtgatttgcaccctgccacatggaatttcagcttctgccaagggaattatgtgtccaaaactaaccatcaacaccgcaaccatgcagcttgtaaccttcatgacaagcagtgagctagccatgatttggaagagttagaggatgaaattgcacttcttcaagggtgagctatagtgactagtgagtatgaagtgatggttttgatctgggggggggccctacgtagctgactcga

SEQ ID NO: 8014 - DNA, 1026 bp, Glycine max
  misc_feature (155)..(155): n is a, c, g, or t
ttttttttttttttttatttaaaaagcaaagagataagattatagatttatgtattaaccatctaatatgcatcctcttttcattttccctctcaaagtgtaactttttgtcctatcattcacatatatattattatttacaaatcacttatagnggctgcaaaatacgcttcaatacaaagccaaccaacaaaatctacaaacaagaaaacttgaatagaactcgccgtgatatatgaatagtagattatatatatcatttatatgttgaagttgttaattagcaagaagatcatggtgagtttaaagtgtggtagaacactgagccccttgctttgaagtgagaggacctgcaggaatagagggtccaaaggcattgatggcaacacaattaacattgaatctgtaacgtccagagacccacgttcccactttccaacgaagctttccattggctttgagattcaagactagtcttccaacaatttgatcacgaccaagttcatagccaagagacggagccacgggtaaagcatttcccaccaaagaagctgttatgagattactctcttcttggccttgataaaagggtggcacaggggtatcaccagtaatttgttggcccttgtaggttgcatagagttgaatctcgtcgtagtaaatgccaactttctggtttgggtttttggagaggagggtgagttggatggaggagttgaggtttgggcctgaaaggttaagttggaagatgtcgacttctttgagggagaattgaggctttgcagggtggaggatgagccatataacaagtattagtagtaggattgtgatgaaaaatgctgagaaagtgaagtagatcttcttgtagttcttgatttttagtccttctttgtcagcacagtgttttggagaggttattgttattttagacatttgtgtgtgagagaaagagggggggagagagagagttgaaagatgaaagaagggatgtttaccacccccttctgtcgtcttctcgcagccgta

SEQ ID NO: 8015 - DNA, 1800 bp, Glycine max
  misc_feature (1580)..(1582): n is a, c, g, or t
  misc_feature (1584)..(1584): n is a, c, g, or t
  misc_feature (1586)..(1587): n is a, c, g, or t
  misc_feature (1590)..(1598): n is a, c, g, or t
  misc_feature (1601)..(1601): n is a, c, g, or t
  misc_feature (1603)..(1603): n is a, c, g, or t
  misc_feature (1606)..(1606): n is a, c, g, or t
  misc_feature (1610)..(1611): n is a, c, g, or t
  misc_feature (1619)..(1622): n is a, c, g, or t
  misc_feature (1624)..(1625): n is a, c, g, or t
  misc_feature (1627)..(1627): n is a, c, g, or t
  misc_feature (1630)..(1630): n is a, c, g, or t
  misc_feature (1633)..(1633): n is a, c, g, or t
  misc_feature (1636)..(1636): n is a, c, g, or t
  misc_feature (1640)..(1641): n is a, c, g, or t
  misc_feature (1643)..(1645): n is a, c, g, or t
  misc_feature (1649)..(1649): n is a, c, g, or t
  misc_feature (1654)..(1655): n is a, c, g, or t
  misc_feature (1657)..(1657): n is a, c, g, or t
  misc_feature (1662)..(1662): n is a, c, g, or t
  misc_feature (1664)..(1666): n is a, c, g, or t
  misc_feature (1670)..(1670): n is a, c, g, or t
  misc_feature (1675)..(1675): n is a, c, g, or t
  misc_feature (1680)..(1680): n is a, c, g, or t
  misc_feature (1684)..(1684): n is a, c, g, or t
  misc_feature (1686)..(1687): n is a, c, g, or t
  misc_feature (1689)..(1689): n is a, c, g, or t
  misc_feature (1692)..(1692): n is a, c, g, or t
  misc_feature (1699)..(1699): n is a, c, g, or t
  misc_feature (1702)..(1702): n is a, c, g, or t
  misc_feature (1705)..(1707): n is a, c, g, or t
  misc_feature (1710)..(1710): n is a, c, g, or t
  misc_feature (1714)..(1717): n is a, c, g, or t
  misc_feature (1719)..(1720): n is a, c, g, or t
  misc_feature (1725)..(1727): n is a, c, g, or t
  misc_feature (1743)..(1745): n is a, c, g, or t
  misc_feature (1750)..(1750): n is a, c, g, or t
  misc_feature (1752)..(1752): n is a, c, g, or t
  misc_feature (1754)..(1754): n is a, c, g, or t
  misc_feature (1761)..(1763): n is a, c, g, or t
  misc_feature (1765)..(1765): n is a, c, g, or t
  misc_feature (1770)..(1770): n is a, c, g, or t
  misc_feature (1774)..(1774): n is a, c, g, or t
  misc_feature (1779)..(1780): n is a, c, g, or t
  misc_feature (1784)..(1784): n is a, c, g, or t
  misc_feature (1786)..(1786): n is a, c, g, or t
  misc_feature (1790)..(1790): n is a, c, g, or t
  misc_feature (1794)..(1794): n is a, c, g, or t
  misc_feature (1796)..(1796): n is a, c, g, or t
gactgcggcaagggcataatagtaacactgcttactcccccttctccatttaccgccgcgaccgagcccccccgcccattcaaccaaaacggacgcttttgttattcttcgtgtcttgttgtgtttttcatctgagatgtgtggaggagctatcatctctgatttcattccggcggcggcgatcgccgggtctcgccgcctgaccgccgattacctgtggccggatttgaagaagcggaagtctgacttggacgttgacttcgaggctgatttcagggattttaaagacgattctgatatcgacgacgacgacgacgatcaccaagtcaagccctttgctttcgccgcctcttctcgtctgtctacggcagcgaaatctgtggcattccaaggtcgggctgagatatctgcaaatagaaagaggaagaatcagtataggggaatccgtcaacgcccttggggaaaatgggcagctgagattcgggatccaagaaagggggttcgtgtctggcttggaaccttcaacactgctgaagaagctgcaagagcttatgatgctgaagcacggaggattcgtggcaagaaagccaaggtgaattttcctgaggcaccaggtacttcttctgtaaaacgttccaaggtaaatccacaggaaaatcttaagactgttcagcccaatctgggtcacaagttcagtgctggcaacaatcacatggatctggtggaacagaaacccctagttagccagtatgctaacatggcttccttccctggcagtggaaatgggctaagatcccttccttcgtctgatgatgcaaccctttacttcagttcagatcaagggagtaattcatttgattatgctcctgagatctcatccatgctttctgctcctttggattgtgaatctcattttgtgcaaaatgccaaccagcagcagcctaactctcagaatgtggtatctattgaagatgattctgcaaagacactctctgaggagcttgtggatattgaatctgagttgaagttctttcagatgccttatcttgaagggagctggggcgatacttcattggaatccttgctatctggtgacacaactcaggatggtggaaacctcatgaacctttggtgctttgatgacattccttccatggctggtggagttttctgaaccgctttttctttggtctccctgtgtgtaaataaagctacaagttgtttttctctgtttttgatttttgttgcatttgttgttctcttgttggacacatccccccatgtgtctgaaaaaaaaaatgtaatttccatttttgttgctttctggaatggttgtcatccgtgttgaagatggagttaaaacaattaactcgctcaagcatctcttgtatctaaagtatggggctatatagttatttaggtgtcctttgccttgtcaaaggccttagttttggggaaatctcgattgttgttcgagggtgattatatatgatctgtgaaacaatcttggctgctgataatttttaactgggttgtttctctatggttatactcctatgacaaaatttgaatgatgatannntntnnttnnnnnnnnntgntnttnattnnttttttcnnnntnngntcnctnttnttgnntnnncttncaggnngntaatntnnntgantttcntgggngagntnncnttnatatgcngcnctnnnatntctnnnntnntttannnactaaatttgtcttannnttatntncntgtggtnnntnttacnctcnttccnntgtncntgcntttntntgcg

SEQ ID NO: 8016 - DNA, 1767 bp, Glycine max
tttttttactaaggatgtaaagtgatactatataaatatattatatatcattcagaataatgcattcctctttttttcttttttttagtcatcacctcaatttatttttatggaacgaatttgaatgctggtagacacaaaagccaaaagccttacggcatttaatttcgctacaacagaacaagattggtatatgttgctttggataatctgaaattttaattaagaaaattaaaccgaaaatgtaggcatagctaatagctaattactagtttgactaatttcaatttttcttgccctcttctccaccttcttccaagtaggtcttcttccttctatcagctctagcaatgacacaaatgaggaaaaaacacgtggcataaatcgcgtgaatcttccaatttgtcttcggcggttgcttcaacacaaccctgtgaaacacggtcacgtaataatgcaacccgatggcaaagcccacaaaagtttgagccaggcccaagaacttggagcccagcccagaatcagttgagaacaccaaaacgaggtacatgaggagtagcaaaaggtagagaacgtaagcgagagtttgaagaacctgcagggaaagatacgtggaccgcgaagtagagtagaaaaacctgagaggttcaaggccagtgacgaaggaagaaagacagagaatggtgaagtagatggcgaggtaggcttggatgaagattaagagcttttggagtgagaaataggctttgattttgttgaagaggagtgagactaaaagcaaagggatcaaagcgaatgcgcaagagagtaaagtggtgatggtgggtgcgtacttgttgccaacgtagggtttgaaccctctcgtgatctctttgttggcttttgttatgtaggcttttgaggttgtggagattcgttccaggtcggggattagtgtttgttggaacttcattggtagatctttgaactccgaaaccaaatcatcgtccacctcgtcttcgaacacccaactaggttgcccttgttgttgtttcttgttgttgttgttagtcttcttactctgcttgtcggattcggtttgatccaaaaacttggttactttattggtaacttccttgtccttgttggtggcggtggcttttgtcgttttgttcttgccgccactagttttcgcgagatccaatgaggatgatttcgttaatcctttggatgtggaattcagcttcttggactttaaggtggtggagttcagtttcttcacggcaacaacctcggtggtgttggtgagggtgtcgccggcggcggctttggttttggctagcttcagttggtttttggaggaattaaggttattggatttgatggttttggtttggtttttggaggagaggttagtggtgggcttgattaacttggtttggtttttggtggatttcgttttcgggggctgttcaaactcttccttttcagcatcaaactccaacaacattctccttctgctgttgctgccaccactagacaaggctttgctctctggttgatgttctgagcaaacaccactgaagcaaacagaaacaaaaaagaacaaaagaagagagaacaggagcacccttctgaaaccaaggtacaagagtggagccatttggttcctccaagatctaaagggccaggctgctagcttgcgtcaatcaaaattaagaccaggatatataatactaatagagattgggtctgagcctaacccgcgaagttatgaatcaagcaggg

SEQ ID NO: 8017 - DNA, 2505 bp, Glycine max
tcagctacgtaggccccccccccaactatgtcattcagcatcccaacaaaagagctacattatctacactggcaatagcatgaatgatgaggcttctgcgttgactctttattcagacatgctacaagaagttgcagacagcaatgctgagcccaagttagtacagcaccacttcaagcgtagtttcagtggctttgttgctatgctaacagaggaggaagccaatagaatggctagacatgatagagttgtagcagtctttcctaataaaaagaagcaactccatacaacaaggtcatgggattttattggctttccactacaagcaaatagagcaccagctgaaagtgatgtcatcattgcagtatttgactctggaatctggccagaatctgagagcttcaatgacaaaggtttcggtccaccacctagtaaatggaagggcacctgccaaacttctaaaaatttcacatgcaataataaaatcattggggctaagatttacaaagtagatggattttttagcaaggatgatccaaaatctgtgagggatatagatggtcatggcactcatgtagcatcaacagcggctgggaatccagttagcacagctagcatgttaggccttggtcagggaacatcaagaggtggcgtgacaaaagcacgcattgctgtgtacaaagtgtgttggtttgatggttgtactgatgcagacatacttgctgcatttgatgatgcaattgcagatggggttgacataataacagtttctcttggagggttcagtgatgaaaactactttagagatggaatagccattggagcatttcatgctgtgagaaatggagtattgacagtaacttcagctggaaacagtggtccaagaccttcctccctgtccaacttttcaccttggtcaattagtgtggctgctagtaccatagacaggaagtttgttaccaaggttgaattaggtaacaaaatcacctatgagggtacctcaataaatacatttgatctcaagggagaattgtatcctataatttatggtggagatgcaccaaacaaaggcgaaggcatagatggatcatcatcaaggtattgctccagcggttcgttggacaaaaaattagttaagggtaaaattgttctctgtgagagcagaagcaaagcactaggccctttcgatgctggtgctgttggggcattgatacaaggacaaggttttagagatcttcctccctctcttccattgcctggatcttaccttgccttgcaggatggtgcctctgtatatgactacataaactctacaaggactccaattgcaaccatatttaagactgatgagacaaaagatacaatagctcctgttgtggcttctttctcttcaaggggtccaaacattgttacacctgaaattctcaagccggatttagtggctcccggagtttccattctagctagttggtctccagcttcccctccttctgacattgaaggtgacaacagaacattgaatttcaatattatctcaggaacttcaatggcttgtccacatgtttctggggccgcagcgtatgttaaatcatttcatccaacatggtctcctgctgctattcgttcagctctaatgacaacagctaaacaacttagtcccaagacccatcttcgggcagaatttgcatacggcgcaggccaaattgatccttccaaggctgtctgccctggtttagtatatgatgctggtgaaatagactatgtaagatttttatgtggacaagggtatagtacaaggactttacaactcatcacaggagataacagtagctgccctgaaacaaagaatggttcagcaagggatctaaactatgcttcatttgcactctttgtcccaccctccaactccaatagtgtaagtggcagttttaacaggactgttacaaatgttgggtcaccaaagtcaacatataaagctactgtgacttctcccaagggactgaaaattgaggtgaaccccagtgttctaccattcacttctcttaaccaaaagcaaacatttgtgctcacaattacgggaaaactagaaggacctatagtttcaggctctttggtttgggatgatggtaagtaccaagtgaggagccccattgttgtgttcaatacagcataatggctaaggttaatccattaaataacttgaagcaaaaatggctgctctcattttattgataatgtaatattgaaatttgaaagtattctaagtggcaagagttgagtgaggcattaaagttgatacctgatagacaagttatcttaacacttcacaagttctaataactcatctacacgttcattaaaaaatatggtcttgaacacatacgcaagatgatgacggtttatgattctcattttaaaaggtcctataacttttaaaaatttgaaaaaaaaattattaacttcattttggtgaattttttaatatataagagtttcgtgtattat

SEQ ID NO: 8018 - DNA, 857 bp, Glycine max
gtctttttttccctcgagatattatttccatatttccattgttgtttgcatatattttctttctccgattatcatctccttattttcatttttatttttattttttcatataccaaaagagtgaagttttctcacgaggaaaaaaaaagctaaaaatggggtcgaagtggatgtggttgatattacactttgcatcggttttggtgtttgtttggggagatagaacaattttgaaggtggaagggcctatgttgttggataattcacagagatatgaaggcagtttcattagcaaagcagtgaacttcttatggcaaccaggggaatcaggttatcaacacgtttggccagacatggaatttgggtggcaaattatcttgggtaccattgttggattctttggagcagcatttggaagtgtaggtggtgttggtggtggtggcatattcgttcctatgctcagccttattattggctttgatgcaaaatcctccacagctatctcaaaatgtatgataatgggtgcagctttgtcaactgtttactataatcttaatctaaggcaccccacactggatttgcccatcatcgactatgatttggcactgctcattcaaccaatgctcatgcttggcattagcattggagtggccttcaatgtcgtagttgctgactggatggtcacaatgctgcttcttgttctctttttcggaacatccacaaaagcattcttcaagggttgttgtaacatggaaaaagggatccttaccgaaagaggaagatgctaggaaacaagcgacaaatggtgttggttctgaaagtagatacacaccaattcccagtggacctggcagtga

SEQ ID NO: 8019 - DNA, 845 bp, Glycine max
aggtcccagtctcagttggagtaactgcatatgaggcacccgcccggccctgcggccgcggggtgacggctgccgcgggagaacaagggaaagatttcactgttctccagttaatgatctattgtgtctttggtgttctggctggtgtagttggtggcatgttgggactaggaggaggattcgttatgggtccactttttctggagttgggagtcccacctcaggtgtcaagcgcaacagccacctttgcaatgaccttctcctcatctatgtctgtcatagaatactacctgttgaaacgttttccagttccttatgctctttacttcattcttgtggctactattgctgcctttgttggacagcacattgtgagaaaactaattatcctattcgggagagcatctcttataatcttcattctagcctctacaatatttgtcagtgccgtctcgttaggtggagttggcattgtcaatatggtacacaagatccagaatcatgaatacatgggatttgaggatctttgcaaatacgggtcatagcacatattggaagattatttttttcgtatttacattactattcaaggtccctaccaaagccaagaaccgaggtcgccaaaattgacttcaattacgtgtcatggcttcaatcgtgttagttaggtgtcatttattgtattgtttgttgccaagtcatggagtgattccgtggggaattcagatgctgaattattccgaatattcattgtgttgagctttcggaataattcagcatctgaattattccgaatattcattgcgttgagcttttgtctcatcttgattttttttaatgataag

SEQ ID NO: 8020 - DNA, 793 bp, Glycine max
  misc_feature (1)..(1): n is a, c, g, or t
ntcgcggcgaactcacaagcaaagcataaacattactgatagttctcatccacaacacaatgatttccaatcccatgttaatgttactagttgtggtactgctggtggttggttttgcaaagtcagatttaagtaaggacagagaagaatgtgcagacaaactaattgacctagctagctgtgttccttacgttggtggtgaagccaaaacccccaccatagattgctgcactggtctcaaagcggttcttgaccggagcaagaaatgcctctgcatcctcatcaaagatcgcgacgaccccaatcttggcatcaagatcaatgctactctcgctattcagctaccctctgcttgccactcacctgctaatattactcagtgtgtagatcttttgcatttagcacctaactctcctgatgctaaggtgtttgagggattccaaaaatctgccaaaacaaacagctccaccccagtttcagtttccagtggtgctgagaagggatcaagctcaagtgctcaggaaaagagtggtgctgtctccacaattacaaaggcgcaccacctgttttactctatcttaccattaccattattatttcttgtttgaaccaccatcaagcttgcttgcttcatctatttctagctattattgtgtgctaaactgaaataaaatctatctatctatttgggtaatgggtagtaattatcaatatttcttcttgttggaaaaaaaaaaaaaaaaaaaaaaaaaaaaaaaaaaaaaaaaaaaaaaaaaaaaaaaaaaaaaaaaaa

SEQ ID NO: 8021 - DNA, 1340 bp, Glycine max
gactactttgtcttctcataaacagttataagccagctacgctgccccccccccagatgtctccaattccaaaacagtttttagggtgatttcagaagcaagccactttcacttgatcttgaagtttgaggaggcatgcaacacttcttgcactgtcatctgtgtacttaagatgaaataaacatctcagtgcaagctcagaaatagatcttattctgaatactcagtggttaatttccatttctattttgtaaataatttctaacataagcatagctaaatcatgaaaccaaactttgatcttgaagtggaggcatgtgcagaatatgaatctgaggttagcagccaggttgcttccaatgtatctattcaagaaacctctataggtccgtgtagtgatagcctcaccaacatttccaacatcacaaatccaatagggattcatcctaattctgatgctatttcacttgacttaagtctcaacttcaagaatagtgagccagggggaagagattcaataggattctcattctcaagcactagtgagagcagcaatgaacctgcctctcaaactacagcagcaaccattccacgagtcttctcttgcaattactgccagcgcaagtttttcagttctcaggctcttggtggacaccagaatgcacacaagagagaaaggacattagcaaaaagggccatgagaatggggtttttctctgaaaggtatgccaatttagcatctctccctctgcatggttctttcaggtccttgggaataaaggcgcactcctcactgcaccatggtttcttaccaacaatgaggcctcctgagataaagagcaatgcaagatatgatcaagggtatcttggccacccgatattcttggaggatgacgagtcagatttgttgtggcctggtagttttcgtcaagttgccgaggcaggtgatagtcatcagaatttcatactgactggaagttctaatatgagttttactgaggtgaacccacctgtagacatagagaactcaacaccagatttgactttgaaactttgaaggaggttatttggtatagttctggcctcgagttgtctgctttattgttatgttattgtacagtaagacatgcatgcaaggggccatgattaccagattgattcctatactcagttgggtttccttttactttcattttcagttttctctcttaggaatcttgctttgttattttgttttctatgtttctcgttgtataagagctccgggaggacaattttggagcttctgtgcttgttatataaatcatgttttcccttcactgtaaaaaaaaaaaaaaaaa

SEQ ID NO: 8022 - DNA, 3068 bp, Glycine max
caaaaccccaacctcaaatctctcatttcctccttcacatcacacttttcttctctctctctctcttcctttcttttttatgcgcagccatgattccgccttatttttagctgattcagattcaaatgctattggacgcaaacccagattcggactcgaatgcttggatctgctgccggttacatgatctccagcttgaagcagttggagttcccgcgcgtccgatttcaatgattttgtattttaagaaaaacctttagcctggatatgtctcttatgggtttataattgtggcgaaatggtttttcattccaaatatataagaacatggaggagacacgagaagatgcagggccggcagagcaagggccatctaatgtgtcgtggtggccttcagattttgttgaaaaatttggatctgtttctttgggttctcaggatgagatcttaagtaataaggagtctcctcgacattttgacaaagatgttttgtcttctcagaaagcatcacaaacactctggcgcattggagtgctttcagaaccaataccaaatggtttctattcagtcattccggagacaagactcaaggaactttttgatagtattcctaccttggacgagcttcatgctctgggtggagagggttttaaggctgatatcattcttgtggattcagagaaagataaaaagctatccatgttaaagaaattaattatggcattagttagaggattaaactctaatccagctgccataattaagaagatagctggattagtttctgatttttataagcgtcccaatgtggaaagtccagcaaaagctgcactagatgaaagctctcacatgtttgagaatcgaggagtccagatgctggggcaaataaagcatggttcttgccgtcctcgagctatcttatttaaagtattagctgatactgttggtcttgaaagtaggctcatggtgggcttgccaaatgatggagctattgaatgtcaagactcatacaagcatatgtctgtgatcgttgtattaaattccgtggaaatgctggttgatcttatgcgatttccaggccaattgttaccacgatcaaccaaggcagtttttatgactcacatttctgcaggagagagtgattcagcagaaaatgattcttgtgattcaccattagaacctaacagccctttatttggggtttcagagagtgctgagaaggaggaaaacctccaattccatagaagatttgaagcatcttcaaatgtatcaggcctttccttgagaaatgtgatgttaagatcaaatagcagtttgagtttgtcacatagtgaacccaacattgccactgcatttggtcggcgtagtcggagaaaggtcattgctgaacagaggacagctagttcaagtccagaacatccatcatttcgagcacgtgggcggtccatgcttagtggtgataggacaacgtttagagattttgccgatgatcaggctacatcaagatccagctataggtcagatggcacatcctcgtcagaagctcgtcggatacgaagaagaagcatcagcattacaccagagattggagatgatatcgtaagggctgtacgggcaatgaatgaaactctgaagcaaaaccgtctcttgagagaacgaggggatgataactcattccccaattctccaaacaatagtagtagtgatgcaaatcttcagaaaaatgtgtcaaatttccatcttgatggccatgatgaaagatctgccctctattcttttcagcgtgaccaaggagcttcacaaaaggcaatgtcattaccatcttcaccacacgattatggaggccaggcttctgagagaagtggaccatcaagatacggagtgaatgatgaaatggagtcaacatggaataaagtactggaatctccaatgttcaataataaacctctgttaccatatgaaaaatggaatattgacttctccgaattgactgttggaactcgcgtagggattggtttctttggagaagttttccgtggcatatggaatggcacagatgttgcaatcaaggtttttctagagcaagatttaactgctgaaaatatggaagacttttgcaacgagatatctattctgagccggctccgacatcctaatgttatcttgtttcttggtgcttgcacaaagcctccacgcttgtcaatggtcacagaatatatggagttgggatcattgtattacttgatgcatttgagcggtcaaaagaaaaagcttaattggcggagaagactacggatgctgcgtgacatatgcaagggtttgatgtgcatacaccgaatgaaggttgttcaccgtgatctgaaaagtgcaaattgtctagtgaataagcattggaccgtcaaaatatgtgattttgggctttcaagaataatgacagagtctcccatgagagattcttcctcagctggaactccagaatggatggctcctgagcttattcgaaatgaaccattcacagaaaaatgtgatatcttcagccttggggtgataatgtgggaactctgcaccttgaacagaccatgggaaggagtaccacctgagagggtggtttattccgttgcgcatgagggttccagattggagataccagaaggccctctaggcaggctgatttcagagtgttgggcagaatgtcatcaacggccaagctgtgaggagattctttctcgtttggtggacatcgagtactccttgtgctgaagcaatatcttttgtacatagaaaactttgggtagagttgttacattgtattatcggctgatgttgtggactatttgtgaattttgttctttttcgcagaacatgcgaaatatgaatcgatatcttatccctgtgctgcagctcgtctctttctggggcaatgaaaaagatgagatcaatccgtctctcaacataattttctgtccaatgaaaagaacagtgttccgagtgttgaatcgctttcctgatccaaattgttgataatcttgcatttttacgtaaatttgagaagtgaatctttgataatt

SEQ ID NO: 8023 - DNA, 1845 bp, Glycine max
ttaattaagaacaatgttaccccagaagcaaggtgaagaaaccatgatgtcaaaccttaacgaaacaacgattgagcgtggtgaagagagagaggaagagaacgtgggtggtggttcacattccagtttgaaaagcattctttggcatggtgggtctgcttatgatgcatggttcagctgtgcctcaaatcaggttgcgcaggttctgctaacactgccatactctttctctcagctgggaatgctctctggcatcatattccaagtcttctatggaataatgggaagttggacagcttatctgattagcattctgtacatcgagtacaggaccagaaaagagaaagagagtgtcagcttcaaaaaccatgtcattcagtggtttgaagtgttggaaggtttactgggtccatactggaaagccattggcttggccttcaattgcactttcctcctctttgggtccgttatccagcttattgcttgtgcaagcaacatatacctcataaatgaccacttggataagaggacctggacttacatattcggagcttgctgtgccaccacagtgttcgtaccttcatttcacaactacagaatttggtctttccttggccttggcatgaccacttacacagcttggtacatgaccatttcagccattgctcatggccaggttgaaaatgtgactcacactggcccaaaaaaattggtattgtatttcacgggcgccaccaacattctctacactttcggcgggcacgccgtcacagtggaaatcatgcatgcaatgtggaaacctcaaaagttcaaatatatctatctttatgctactctttatgtgttcacactcaccctaccatctgctgttgccgtttattgggcctttggtgacaaactcctggaccactccaatgctttctctcttcttccccgctctggttggcgcgatgccggtgtcatcttaatgctgattcatcagttcatcacttttggatttgcttgcacaccattgtattttgtgtgggagaaggtgataggaatgcatgacacaaagagcatatgtttgagggcacttgctaggttgcctgtggtgataccaatctggtttttggctattatcttccctttctttggtcctattaactctgctgtgggggctcttctggttagcttcaccgtgtatgtcatccctgcttgtgctcatatgctcacttacaagtctgcttctgcacgacagaatgctgctgagaaattgcccttcttcatcccaaactggacggcaatgtatgtggtgaatgcatttgtggtggtgtgggttctagtggttggatttggatttggagggtgggctagcatgacaaactttatcaaacaggttgacacatttggactctttgccaagtgctaccaatgcccgccaaaagtccctgcttccaacaacacaatgctgcatcattgaaaattatatatgttcttctgctttaaacatatagggacacatcagcatctccacccttgtgtatttcccctatctttttgtttaatctctctagctataaatattgttaatgctgatgttcccttgtgtagaaaggcaacattgttatatttcgctttcgaatcattttggttaatcataagcatgcactatagttatagcatatgtagggagtgatgtttggcaattggcatatagcgacctcaagtatagcctgcatgtttccaataatgtctttgcattccaatataatcatttttttcttctccaaatctcaagtattggtagaacatgtatgtttggtgaaagttacattataaaagcgtgtagtatatgttgcttcc

SEQ ID NO: 8024 - DNA, 2066 bp, Glycine max
tcagctacgtaggcccccccccccccggtagtagagattaaataaagagaagaattaggattaattgaattgcgagcaagtataactcggctcagctcaactcaagtgtttgttttgtttatcgagttgaggctgaggtgaggccttgtttgcctgaccctgaccctgaccctgacccgacgaacgacggagaaagaagagagattaaccggggaagggtttagggtttgggagtggaagaatcgaatcgaatcgaattgagaatgtctctgacgagcgtgacaatgtcggaggaagtgtggttaagctgcgtgactcatgcattgtccactgagaccgaagagattatgggccttcttcttggggacatcaagcattcgaaaaacgggagtgtgactgcattgatatggggggcgtctcctcagactcggtctgatcggcgaaaggatcgagtggaaaccaaccctgaacagttggctgctgcttctgccttggctgatagaatgaccacatccactggaagaacaaccagagttattggttggtaccattcacaccctcacattacagttctcccttcccatgttgatgtgcggactcaggcaatgtatcaacttcttgattctggatttattgggttgattttttcctgttacagtgaagatgtaaacaaggtaggaagaattcaagtaattgctttccagtcatctgatgggaagcagaatcacaggtcaagacctatacctctgtctcctgtaaatagaagccctgttattgatattgattcatcaccaagttcctccgagaatgtatcaacaaagcctggttacttcgaggcagagaatgccgagcaggatactggcgattcaagaagtgttgttgttagtaaggatggggggagatcagacttggggaatttctttgctaatgctgatgccaactatctagggagagataaaagtggaggaaactaccatcccaacaattcagacaccaacatagttgatgttgatcccatggatatgtcagaaagtatgcaagaggctatgcatcgttcaaatttggacatgagtggtgcagagttcgtaagaaaagaaattcccctatatgttttgccagccttgtctttaatcaaccttgattcaccactatcgtcatacactgatctgcaacatgtactatttgaagaggaacaaaatgcatataatcaagccatcttacaaaatatgagggatgggaaagtgcatccactgactttcatacaccacacttcaacttatcaggcttccttgtgcaagctgattgaatattgtttaagtcctgcaataaatgcacttcaagatcgactgagagagaatgaaattcggttagcagttctgagtgaagaagccaaaagtctggaagctgaggcatatagagggagtgaagcaagtgtaggatctccccgtcgagttgcatctcctgtacatcgaggaggttcctctcctggtctgagaaacttgcatgactcgcctgaatcactcggttctaggaatgtagcaagtcctggtagcaggagcagaaaaggatattaaagtgacaccctctttgggagtaatgctccaagcaatataaacgatgatgatggtttacgatggttttgctaaaatgggatgtttaatatgtagaatgtacatggaaatggtgttgcctcagcaaagtttgctagttgaaaatgatgctaaattaagtattatgctagtgagagtctaatagtgtagaaatggtggtttggtgatttcattcacttggaagaacacattgaaatgatcaaatggcatgcacggttggattagaagcatgttaaacagccccctactcatatggccaccgtttgaccctgatccttatgctaaagttaaagcagggttagatgatgagggagaaaaaaaaattgtacacagaaatacagaatcttatactatcgcaattgctgctgctattttcaacgtggaaaaggattttggttaaaaataaaataaaagattaatgacttgtgatttaaaaaaaaaaaaaaaaaaaaaaaa

SEQ ID NO: 8025 - DNA, 1357 bp, Glycine max
tcgagtcagctacgtaggccccccccccctcctatcatcttcctccttagcctcacctctcccattcccaatcccaatcccaatcccaatccaaacatgttagggttttcagtgttcaaatttccccttcccatttcttcaattaacataactcatgcagcatgattccgccaccttcaactccaaatttctttacaaacgcactcaccaaccaaccgatcgcatttcttcccttcgccaaactctcgcctattcgcccttcctcggagacaagtgtaaaggcagaaaggttgtaaaatcttcaaaggatttctcaatcaaggggtggtgttgcaatgttagcttctaaagaaatgatgaaattcaaatcttaccagaaccgggctaatttgtttgtgaaggaatatttgttagcagaccctctgattccatatacttctattattggtggtatttttgcttgcaagatggtctatgatcttactcagctatttagcactgttcactttaagagctattccagcctcactagaatccaacgtgttgagtggaataatcgttctatgtcaacaattcatgctattttcataacaactatgtcgttgtacttggtgttttgctcaaatctatattctgacaaccaatcgtccgaacttattacatttcgaagctcttcatcatctacctttgctctgggggtgtctgtcggttacttcattgctgaccttgggatgatattttggttttttccttctcttggtggatatgagtatgtgattcatcatttgctttctttagtagcagtagcattttcaatgctgagcggggagggtcagctatacacatacatggtcctgatctctgagacaacaactcctgggatcaacttgagatggtatcttgatgcagctggaatgaagaagtcaaaagcttatctcatcaatggggttgtgatattcattgcttggctggttgccagaatacttttgttcgtttacatgttttaccatgtctacctgcactttgaccagattgagcagatgcacgcgtttggacaagtgttagttattgttgtgccactggcactatcagttatgaacttgatttggttttcaaaaattatcaaagggttgaggaagacgttggcgaagaggcagtgaaaattctgcttagtgatgttattttagaaaactgatatacaggtcaatgatgtgtagtgaaagatgtaacagaacagaaacaattgaaagtgtttggatcccctgtggattcgaacttgtacaaagatgttcattctgccttttttcttctattaatgtacatttattagtttaattttaatatattgttcgatgca

SEQ ID NO: 8026 - DNA, 1680 bp, Glycine max
aatacaatacttgtcataagtcacaaccatggataattccaaccttcaacgtctcttcactctcttccttttttccctaattgcaccctctttggctcaacaatccttcagacccagagccctcgttgtcccagttaaaaaagacgcttccaccctccaatatattactcaaatcaaacaaagaacaccactcgtcccagaaaacctagtacttgacatcggtggccaattcctgtgggtcgattgcgacaacaactacgtctcctccacttaccgccccgcacggtgtggctccgcccagtgctccctcgccagatccgacagctgcggaaactgcttctccgccccaaaacccggctgcaacaacaacacgtgcggcgtcacgccagacaacaccgtcaccggcaccgccaccagcggcgagctcgcgcaagacgtcgtctccctccaatccaccaacggtttcaaccctatacaaaacgccaccgtttcgcgcttcttattctcctgcgctccaaccttcttactccaaggcctcgccaccggtgtcagcggcatggccggtctcggcagaactagaattgctctcccctcgcagctcgcttccgctttcagcttccgtagaaaattcgccgtctgcctctcatcttcaaacggcgtcgctttcttcggtgacggaccctacgttcttctccccaacgtcgacgcttctcagctactcaccttcacgccgttattaattaaccccgttagcaccgcctctgctttctcccagggagagccttccgccgagtatttcatcggcgtgaaatcgattaaaatcgacgaaaagacagtgccgttaaacaccactttgttgtccataaacagcaaaggcgttggtggaaccaagattagttccgttaacccttacactgttttggaggattctatcttcaaagcggtgacggaggctttcgtgaaagcttcttctgctaggaacataacgagggtggcttctgtggcgccgtttgaggtgtgcttcagtagggagaacgtgctcgccacgcggttgggggcggcggtgccaactattgagcttgtgctgcagaaccagaagacggtttggaggatttttggagcgaactcgatggttagtgtgagcgatgataaggtgctatgccttgggtttgtgaatggaggtgagaatccgaggacttcgatagtgattggaggatatcagctggaggataatcttttgcagttcgatttggctacttcaagattgggattcagctctttgctctatggaagccgaactacgtgtgctaacttcaactttacctccgctgcgtagaaggaaaacgtttcaataattagcattatctcattctctcattcataataaatgccgcctgcggaatttaggttgagcttcgcaactacgagtttcaaataaactgttaaacacaagtattttctatttccttttgatacatacagggttcatgttttttaatttggataagcccctacatggttcatgtatcttataagtttgaatatttgttcagagacaaacgtaatccaagtgtgggacaccttcattgctctttgtcttgcattatatacacatttaaatgcatattttttattaataaatattaatgcttagtattgctaattttttttgttagcgaa

SEQ ID NO: 8027 - DNA, 806 bp, Glycine max
  misc_feature (785)..(786): n is a, c, g, or t
  misc_feature (797)..(801): n is a, c, g, or t
gttccctcacagacaacctgtgtcaaatcctaagtacactctccaaccaacaacaacacagccttagtttcattcacttaacactccttttaagagagaaggatcaaacatgggagctggaagtttcctcaaggtggttctaaaaaattttgatgttctcgctgggcctgtgcttagtcttgcctatcctctatatgcctcggttagggcaattgagagcaagtctcctgttgatgaccagcaatggctcacttattgggttctctactccttgatcaccctctttgaacttacttttgccaaagttattgaatggattcccatctggccatatgcaaagctgatccttaccagctggttggtcattccttacttcagcggcgcggcctacgtttatgagcactatgtgagacctttctttgtcaatcctcagaacgttaacatctggtatgtccctagcaaaaaggactcctcgggcaagccagaggacgttctcactgccgcggagaagtacattgaagagcatggaactgaagcatttgagaatctgcttagcaaggctggtaaatctaggaaaagtggcaggcatgcaaattgaagctattgaatgcaatatattagcctagcttgtgtcatgtttgggataaaggggtgcatgtacatgtgttggcttaacttttgttaagttgtgtaactatatcagtcttagtcatctatgttttggctcaaggctatacaactatggtatgtgccaaactgtagtaaatagaattataggatatagnntaatagataannnnntcgat

SEQ ID NO: 8028 - DNA, 1556 bp, Glycine max
cagcacccccatccactggaccctccccactccatcatttattatactttcttcttcttctttattattgttgattaatataacatacacccacatatttcatatgggtacttgttaatttgggtgtggattgttggtttgttacttgttttgttccgttcaggtgattgtttgattgagccttgaagaaatggaccacagcgctgatgcacatcgcacggacttgatgaccataacgcggttcgtgctgaacgagcaatccaagcaccccgagtcacgcggcgatttcaccatcttgctcagtcacattgttctcggttgcaagttcgtttgttccgctgtcagcaaggctggtcttgctaaacttattggactcgctggagaaaccaatgttcagggtgaagaacagaagaaactggatgttctttccaatgaggttttcatcaaggctctcataagcagtggccgaacatgcatcttggtttctgaagaagatgaagaagcgataattgtggagccttctaagcgcggaaagtactgtgtttgctttgacccattggatggctcgtccaacattgattgtggggtttccattggcacaatttttggggtttatgcgttgaaagatgtccatgaaccaaccatagaagatgtcctgcttcctgggaagaacatggtggcagctggttactgtatgtatggaagctcttgcacgcttgtgttaagcactggagcaggtgttaatggtttcacccttgacccatctcttggtgagttcatcctaactcaccctaacattaagatcccaaagaaaggtaaaatttattcagtgaatgaaggaaatgccaaaaactgggatcgtcctactgctacttacgttgaaaaatgcaagtttcctgaagatggttcatcaccaaagtctctaagatatattggaagcatggtagctgatgttcatcgtacgttgctttatggaggcatctttttgtaccctgctgacaaaaaaagtccaaatggaaaacttcgtgtcctgtatgaagtcttcccaatgtcattcttgatggaacaggcaggaggacagtctttcacgggcaaggaacgggcacttgatttagttccaacgaagttgcacgagcgatctcccatattccttggtagctatgatgatgttgaggaaatcaaagctctttatgctgctgctgagggtgaacaagaatgaaattggaaaggtttcttgtatctttcgctacttacaagcgcttgttttctaattgttactagcaggtgcttataagaaaactagttatctggtcatgtatatgttaataaaattggttgatgtgcctgtcagggctatagaatttatttagataaaatacttagattaaagtatcattttgttgctgaagaagtataactgcttactttccctcaagatgcatttcaaagttaaatccgcagacctgttagttactataacgccatttttacacattttcatttcattatatcttatattaccttcatttcaaataataataacggaattgatattg

SEQ ID NO: 8029 - DNA, 571 bp, Glycine max
ggcaatccttgaaggcttaaacggtcaacttaggctggagaaccgatatcaaaatgtaatgcacacacaacacaacacaacagcgtggaacgagacaactaagtacgaaaatcgttatccgccgcaacagccactaagatgttctttgagtcttggcacgccacgtgtcagaactgccaacagatagccccatctctttctccttctccctaaacctcgaactcagcacccccatccactggtgattgtttgattgagccttgaagaaatggaccacagcgctgatgcacatcgcacggacttgatgaccataacgcggttcgtgctgaacgagcaatccaagcaccccgagtcacgcggcgatttcaccatcttgctcagtcacattgttctcggttgcaagttcgtttgttccgctgtcagcaaggctggtcttgctaaacttattggactcgctggagaaaccaatgttcagggtgaagaacagaagaaactggatgttctttccaatgaggttttcatcaaggctctcataagcagtggccgaacatgcatcttggtttctgaagag

SEQ ID NO: 8030 - DNA, 758 bp, Glycine max
acattaatcattatttgcccttgtaacccacattatgagcacgaacgagaagaagaagaaaaagtcgtctctattgagccgcctcagggtggcggtgcagaaggtgaagttgctactaaacgccaccgtactcagccacgcgtggcatgctgcaaccattctccgcggcgtttctctgagcaaacgccagatcagtttcaacgaccgaccagggttgatgatgtgcactgcttccgatgaaactgattcagaggatttggtttctccagcgcatagccttcagaggaccataagttgtccctccgatgatgatatcgataagagagcagagatgtttataaataatttcagacgccagcttaagatggagaggcaaatctcgctgcagctacgttattgcagggagaatagtcttgaattggtgtctccctgaataattgttcagttttcttgaaatggaggacttttgtgttttttttccgagaaggatctccatttttgccgttcgcgttgatcgccccgagaacatggacaaaaattgtgaaaaaaagattttggagtgattttgaaggataagttttatggtttttttttttttttcatttgtaaagttttggatttttgggattgttttaatcttgggtgatttgcagcaattagaatagcttgggagcatatgctgtttttgttagctgctccttttctttctcattgtcccccctataataaaataaatccctctagaaaaaaaaaaaaaa

SEQ ID NO: 8031 - DNA, 2753 bp, Glycine max
  misc_feature (70)..(75): n is a, c, g, or t
  misc_feature (198)..(220): n is a, c, g, or t
  misc_feature (348)..(352): n is a, c, g, or t
  misc_feature (424)..(447): n is a, c, g, or t
  misc_feature (460)..(464): n is a, c, g, or t
ctgcagacttcttctgataaaactaccacactgggtctatcaatactaaggaactttgatgtttatgctnnnnnngactggtactggattggagctgctgctcttcttggtttcacagttctgtacaatgttctcttcacccttgcgcttatgtaccttaaccgtaagagctcacatcttgatcaatctttcaagtgnnnnnnnnnnnnnnnnnnnnnnnctaaagcttttatctattcttgtttggtgcattagctcttggaaagaaacaagcaattatttctgaggaagatgcgagtgaaatggaggctggaggagatgccaacgaagaacccagactagtaaggnnnnnatccaacagagaatcaatgcttcgatcattatctactgctgatggaaataattcaagtaagtgttaaagcannnnnnnnnnnnnnnnnnnnnnnngatggtttggctnnnnntatgttcttattgatgtaatacgtgaatcatttcccgggcaggagccacggcccggaatgggtagccaagctaccagtggattaagaaaagttgactcggcaaacgattcagctactggagttgcccccaaaaaaggaatgattctacctttccaaccacttgcaatgtcctttgacactgttaattactacgtcgacatgcctgcagaaatgagagatcaaggagtgacagaagataggctacaactgcttaggggagtaactagctcctttaggcctggagtcctaactgcactaatgggagttagtggcgctgggaagacaactttaatggatgttttagcaggaagaaagacgggtggctacattgaaggagatattagaatctcggggttccccaagaaccaagaaacctttgcaagagtctctggttactgtgaacaaactgatattcattcaccccaagttactattagagaatctttgctttactcagccttcctccggttaccaaaagaagttagcaaggaggaaaaaatacaatttgtggaccaagtgatggatttggtagagttagataatctcaaggatgctatagtggggcttccaggagttactgggttgtcaaccgaacaacgaaagaggctgaccatcgctgttgagcttgttgctaatccttcaattattttcatggatgaacccacttctggtcttgatgcaagagcagcagctattgttatgaggactgtgagaaacactgtggacactggaagaacagttgtctgcacaattcaccagcctagcattgatatctttgaagcctttgatgagcttttgttgatgaaaagaggaggacaagtgatctactcaggaccattaggccgaaattcccacaagattacggaatactttgaggcaattccaggggtcccaaaaattaaagagatgtacaacccagcaacatggatgctagaagtgagttctgtagcagctgaagttcgtcttggaatggactttgctgaatactacaaaacatcatctttattccagcgaaacaaagctcttgtaaaggagttaagcacacccccgcctggagctactgatttgtatttccccaccaagtattctcaatccacattggggcaatttaaatcctgtttttggaagcagtggctgacatactggaggagtccagattataatctcgtcagatattttttcaccttggcttgtgccctcatgatagggacagtattttggagaattggcaaaaacagggagagctcagctgatctgacaatgattataggagcaatgtatgctgctgttatttttgttgggattaacaattgtcaaactgttcaaccaattgtagccgttgaaagaacagtgttctatcgagaaagagctgctggaatgtatgctcctttgccttatgccttagcacaggtcttttgcgaaataccatatgtgtttttccaaactgtttattactcactcatagtgtatgcaatggtgagctttgaatggaaagtggagaagttcttttggttcttctttgtcagcttcttctctttcttgtacttcacatattatggaatgatgactgtgtccatcacaccaaaccaccaagtggcatcaatctttgcagcagcattctatggactctttaatctcttctctggtttctttatcccaagaccgaaaattcctaaatggtgggtgtggtattactggatttgtccagtggcatggacagtgtatggattaattgtctctcaatatagagatatagaggacccactttttgtgcctgggagtactactcaaaatttcactgtcaaaggatatattgaagaccactacgggttcaaatccgacttcatgggtccagttgctgcagttttggtagctttcactgtcttttttgcctttgtattttccttctgcatcaaggcactgaacttccaaacaagataaaagaacttcatcaatgttggaagtacaagttatgctacggcatgttgtaacggtctaaatgacctgtgaatgtaaataactgaggctggagttaatgctcaagatttattatgcaacattataagcttaatagatgaccacgatagttttgctagcagagggttcttaagcaagtgtaaatctatatcaattgtactgttattagtttgatttgctacctagaagaagttagatgtttcttatggtcaattcttgcaacaacattgtttgttataaatagcagcttattcttttacattaaaaaaaaaa

SEQ ID NO: 8032 - DNA, 1091 bp, Glycine max
gtagaattcacataaacagggagagctcagctgacctgacaatgattataggagccatgtctgctgctacgttcatattatcgcttggctggaattaacaattgccaaactgttcaaccaattgtagccgttgaaagaacagtgttctatcgagaaagagctgccggaatgtatgctcctttgccttatgccttagcacaggtcttttgtgaagtaccatatgtgtttttccaaactgtttattactcactcatagtgtatgctatggtgagctttgaatggaaagtggagaagttcttttggttcttctttgtcagcttcttctctttcttgtacttcacatattatggaatgatgactgtgtccatcacaccaaaccaccaagtggcatcaatctttgcagcagcattctatggactctttaatctcttctctggtttctttatcccaagaccgaaaattcctaaatggtgggtgtggtattactggatttgtccagtggcatggacagtgtatggattaattgtctctcaatatagagatatagaggaccatctttttgtgcctgggagtactactcaaaatttcactgtcaaaggatatattgaagaccactacgggtttaaatccgacttcatgggtccagttgctgcagttttggtagctttcactgtcttctttgcctttgtattttccttctgcatcagggcactgaacttccaaacaagataaaagaacttcaatgttaaagtacaagttatgctatggcatgttgtaacggtctaaatgacctgtgtatgtaaataactgaggctggagtcaatgctcaagatttatgcaacattataagcttaatagatggccacgatagttttgctggcggagtgttcttcagcaagtgtaaatccacatcaatcgttctattattagtttggtttgctacttagaagaagttaggtgcttattcttgcaacaatattatttcttataagtagcagtttattcttttacattaatttagaatatttatccatgatagatgcattattttttatttcctctagtcagcccggcaatagattccatcccag

SEQ ID NO: 8033 - DNA, 2492 bp, Glycine max
  misc_feature (1150)..(1154): n is a, c, g, or t
ggctcgagatttattttatcctggatgggcatggtctttggccacttggattcttggtgtaccttattcccttgttgaagctgttatatggtcttgtgttgtatactacactgttggatttgcccctgctcctggaagatttttccgctacatgcttttgctatttatgcttcaccaaatggcattaggtctcttccggtttatggctgctcttgcacgcgatatggtcattgctaatacatttggaacagctgcattgatgattatcttcttgctgggaggatttattatcccaaaaggtatgattaagccatggtggatttggggttactggttgtcacctcttacctatggtcaaagagcaatttcagtcaatgaatttactgccacaagatggatgcagcattcggcttttgggagcaacacagttggccttaatattctcaagggattcgatataccccctgaggattactggtattgggttggtttgggagttttaacactctacgctcttattttcaactgcttggtcactttgggcttgtcctatctgaatcgtaagtttagaacaattttccttatctttttattctcatttaagcaatgaaatttcttttggtatgcaatgggttgatctctaagaaggcaaggactgtcattttctcgaatcaaaggatactagtttatgctcctttttgcttttgaatgccacagcactccaaaaagcacgtgccattcttcttggtgatgaagacgattcaaaagagagttctaataaaaatggatctaaatctagtggtgatgatggaaaagccaagggaatgaggttttcttttgagcctatgacaatgacattccacggtgtcaattattatgttgatatgccaaaggtggggggcatttgtagtttcagtttcctgaattttttttttttcaaagacaaatacaagtagtagaagcttcttcacctttaattctttctgaatgaacttgcttttcacaggagatagcaaatcaaggcatagcagaaactaggctaaaactcttgtcaaacgtgagtggcgtttttgcacctggtgtccttacagctttaatgggatcaagtggagcaggaaagaccactttgatggatgttcttgctggaagnnnnnctggaggtatcattgaaggagatataagaatcggaggctaccccaaagtgcaaaagacatttgaaagagtttcaggttactgtgagcagaatgacatacattctccatatataaccgttgaagaatctgtcacatactcagcttggttgcggttgccaacagaaattgattctgtcacgaaaggggtatgacgtccttatcacttgcactgtggtttctctttcccagataacagatgtattttgtaactttctaaattctgtgtatatctactgagcagaaatttgttgaagaagtccttgaaacaattgaacttgatggtataaaggattgtttagttggcatccctggccaaagtggcttgtctaccgaacaacgtaaaagactaaccattgcagtggagctggtttccaatccatcaataatattcatggatgaacctacatctggtttggatgctcgagcagctgcagttgttatgcgtgcagtgaagaatgttgttgccactggcaggacgacggtttgcactatacaccaaccaagcatcgacatatttgagacttttgatgagttgattctaatgaaatctggaggacggattatttatagtggaatgctaggccatcattcaagtagactgattgaatattttcagaatatacctggggtgccaaagatcaaggacaattataatcctgcaacctggatgttggaagctacctctgcatctgtagaagcagaacttaaaatagattttgcacaaatatataaagagtcccacctttgccgggatacccttgaattggtgagagagttgagtgaaccaccgccaggtacaaaagacttgcacttttcaactcgcttcccacaaaatagtttgggacagtttatggcatgcctttggaagcaacacttgtcttattggagaagtcctgagtacaacttaacacgtttcattttcatgattgtttgtgcaatcatgtttggagcagtattctggcagaaagggaataaaataaacaatcagcaggatttgttcaacgtacttggatcaatgtatattgctgtaatattcttgggtctaaattactgttcaacaattctaccatatgtggctactgagcgtgctgtcttgtaccgagaaaaattcgctggaatgtactcttccacagcttattcatttgcacaggtggccattgaaataccatatatcttggtgcaatcaattttatatgtggctatcacatatccaatgataggtttccattggtcagtttcagaaagtggtttggtacttctacaccacattcctgtacatttttataatttggatatctt

SEQ ID NO: 8034 - DNA, 1571 bp, Glycine max
ccacgcgtccgaaagcgctcttgtatacagtaaaaactctgtgccacaatggaccttttccacgcgtccggggacaaggagtggctgctgatcaagaggaactccttcgtctacatattcaagacagctcaaataatcttcattgccttcatagccgcgacgctgttcttgaggactgaaatgcaccggaataacgaagatgatgctgcactttacattggtgcaattttgttcactatgatcatgaacatgtttaatggttttgctgagctagcactcacaattggaaggcttcccgtgttttacaagcacagagaccaccttttccaccctgcttggacttacaccctccccaatttcttgttgcgtattcccatttctgtgtttgagtctcttgtttgggttggtgtcacctactacatcataggatttgctcctgatgccagcaggttcttcaagcaattgttgttggtgtttctgatccaacaaatggcagctgggatgtttagggtaatttctggagtgtgcaggacaatgattatagctaacactggtggagccctcatgctccttcttgtttttctacttggaggcttcatccttccaaaacgtgaaattcctgattggtgggtgtgggcttactgggtgtcaccattgacatacggctttaatgccttgtctgtgaatgaaatgttagctccaaggtggatgcatccacagacttcttctgataaaaataccacattgggtctatcagtactaaggaactttgatgtttatgctaaaaaagattggtactggattggagctgctgctcttcttggtttcacagttctgtacaacgttctcttcacccttgcgcttatgtaccttaaccctcttggaaagaaacaagcaattatttctgaggaagatgcaagtgaaatggagtctggaggagacaccaatgaagaacccagacttgtaaggcccccatcaaacagagaatcaatgcttcgatcattatctactgctgatggaaacaattcaagagaagtggcaatgcagcgaatgggtagccaagctaccagtggattaagaaaagttgagtcggcaaacgattcagctactggagttgcccccaaaaaaggaatgattttacctttccaaccacttgcaatgtcctttgacactgttaattactacgtcgacatgcctgcagaaatgagagatcaaggagtgacagaagataggctacaactgcttaggggagtaactagctcctttaggcctggagtcctaactgcactaatgggagttagtggcgctgggaagacaactttaatggatgttttagcaggaagaaagacgggtggctacattgaaggagatattagaatctcggggttccctaagaaccaagaaacctttgcaagagtctctggttactgtgaacaaactgatattcattcaccccaagttactattagagaatctttgctttactcagccttcctccggttaccaaaagaagttaagcaaggaggaaaaaatacaatttgtggaccaagtgatggatttggtagagtaga

SEQ ID NO: 8035 - DNA, 1255 bp, Glycine max
tcgcccacgcgtccgtacggctgcgagaagacgacagaaggggccactttatttgtctctctctttcccttctaacctcccattccgttttctctgcagtactcaattgatccctttgtttttctattcgttctgagagctttgtgtgtatggccggcatagacttgggttcagcatcacattttgttcatcatcgccttcaacgccctgaccttgaagacgatgagaaccaacaagaccaagacaacaaccttaacgatcacgaagggcttgacctaattacaccaaatccaggtcctggtgatgttgttggtcgcaggccaagaggaagacccccaggttcaaagaacaagccaaaaccaccagttatcatcacaagagagagtgcaaacacccttagggctcacatccttgaagttagtagtggttgtgacgtctttgaatcggtcgctacctatgcaaggaagcggcaaagagggatatgtgtcctcagtgggagtggcaccgtgaccaacgtgacattgaggcagccggccgcggctggtgccgtcgtcacgctgcacggaaggtttgagatcctctctttgtcaggatcattcctcccacccccagctccaccaggcgctacaagtttgactgtgttccttggtggaggacagggtcaagtggtgggaggaaatgttgttggtcctttggtggcttctgggcctgttattgttattgcttcatcttttactaatgtagcatatgagaggttgcctttggatgaagatgaatctatgcagatgcaacaagggcaatcatcagctggtgatggtagcggtgaccatggtggtggagttagtaataactcttttccggatccgtcttccgggcttccattcttcaatttgccactaaacatgcctcagttacctgttgatggttgggctggcaactctggtggaaggcaatcttactgatccagagtctttgggggcacaaaggtgagaagttgaattgatctcatatatattggtcttctctaatctttcctctgaatattgcttgtgaagaagtactgatttttctattgaagaatcgttttgtttggctaggtttgttgtaaggacgatcagtttctaggaacaactgtaaaacgttttctcttggttgctggagttattagactagactgttgtgcattaaccttgagttgaataaatcataggctcaaatcaataacaaaaatatatattttggatttttaaaaaaa

SEQ ID NO: 8036 - DNA, 1338 bp, Glycine max
  misc_feature (1329)..(1333): n is a, c, g, or t
tcgagtcagctacgtaggcccccccccaagtagcaagcatggcaggttcaatttctttgttggggttcgctttggtcatttttatccaaatcatgacacagtgccatagcagcatcactacatgcttgcccgagaaacatgctgcactattcatattaggagattcgctatttgataacggaaacaacaattacatcaacaccaccacctcttaccaggcaaactatcctccctatggagaaactttcttcaaatacccttctggcaggttttctgatggacgcatgataccagatgccgttgctgagcttgctaagttgcctatacttccaccgtatctgcatccgggtaacgttgaatatgtctatggtgtcaattttgcttcaggaggggccggtgctctgcgcgaaacatcccagggaatggtgatagacctcaaaactcaggtaagttacttaaaaaatgtaaagaatttatttagtcaaagattcgggcatgcaatagccgaggaaatactgtccaaatctgtctacttgtttaacattggagccaatgactatggttctctactggatccaaactcaaccagtgtacttcttccggttgatcatcaaggatttgtagacattgtaattggaaacctcacagacgcgatcaaagaaatttataatgttggtggaaagaaatttggatttcttaatgtgcctccgataggttgttcccctgccgtaagaattttggtcaataatggaagcacatgctttgaagaattttcagccatcgcaagattacacaacaatgcactctcaaaaaggcttcacgagctagagaaacagctcaagggattcaaatattcagtcatggatttttacagtgcattttctcaagtgttcaacaatcctacaaaatatggcttcaaagtagcgagcgtggcatgttgtggaagtggaccatttagaggagtggatagttgtggagggaacaaagggataaaagaatatgaattatgtgacaatgtcaatgaacatttgttcttcgactctcatcatcttactgatagagctagtgaatatttcgccgaattgatatggaatgcaaatcgcactgtcacaagtccttacaatctgaagcaactatttgaactttgaatatgttctaccaagcaagatatatctaaagaaagacctattatcatgatagctttgtttccgagttctgtatcttggttcactctggtattttgtgttcaataagtgggttgagcttgccaaataaaaatggtcttgatgacttgaattcaaaaaaaaaaaaaaaaaactgcaaaaaggnnnnntataa

SEQ ID NO: 8037 - DNA, 1015 bp, Glycine max
aaaaattcttcaaccgcttggtagttgcatattgggcatttggcatcaacaatcaacaatcaacaatcacaaatagaaactcactctttcgaaaaaaccagaatttgaatatgacgttagggtttgagggttatagttataccacaacacttggaaggaagagggtcgtgttattacacaatgaagcttcttctctcaactctaattcggcggtgaatccattgaagagaatgtgcagcggaaaattcacttttgactctgaaaggtctcgccttgaggcccttcctcttgatgttctgattagggtgttgtgtggtgtcgatcatgaagatttggagcaacttgttcgtgtctcaaaaactgttagagaagcggctgagattgctaggagaatgcattttgagtatagcactccaaagaagaaaacttttgctcttcctaaaccgtttgatatagagggtgctggtgggtttgaggaaattgatactccaaatgccccattgaggaaacctaagtcaaagctgattggaaagaatctggctagcatctcagtggcattgttcgcttccgctaattaagaagaacagtgactggacaaggaaaaagaagcaacttgtgatggcacggacaatttctcttgttttgggtagttctgtgaacagatagtattaatttgttatgtgtatattagttggtacttggtagattagagagggacttgatacatacttagaagatctcactagctgatttcacacgttttgaaatagtctttacaagctaaatcttcttcaattccttcattgaagattgctttgacttgtttgcaatctttctgtatatctataggacaagtagaaagtgggataggttatagatgattatttggagggaaatccttggcccttctagtgtgataaatttaactgtgcacagtccattaagcatagttttgtgcttctctaataaaatgagtaaagtttccgctaaagaaaaaaaaaaaaaaaaaagattc

SEQ ID NO: 8038 - DNA, 1102 bp, Glycine max
tacggctgcccgacgacctgggccttttgggctcttgggtatcaagccttgtgttggctgtaatagaataagcttcaattggaaacgccagagctccatcaccggaacaagacccaggcaggtgtcgcagtacgcggagaaaggacgctatataaatatatttgtccccgatgctctctatttcagccactcgtatattcttcctccgctcaacaactataagattatcttcttcttcttcttctcttcaattcttctccaatcccaaccgcaccctcttccgtccctttcttcacacttccttcaaaccacttccttcgtctttctctttccgaacagatcacactatggccacctcaaacgccaaatcagtccatgatttcaccgttaaagatgccaagggaaatgatattaaccttggtgactacaaaggaaaggtccttatcattgtcaatgttgcctcacaatgtggcttgactaattcaaattacactgagctcagtcagttgtatgagaaatacaaacagaaaggtctggaaattctggcgttcccatgcaatcagtttggggcacaggagcctggatctaatgaacagatacaagagtttgtttgtactcgcttcaaggctgagtttcccgtttttgacaaggttgatgtgaatggtgacaaggctgctccactgtacaaatatctaaaatcaagcaaaggtggactccttggggatggcatcaaatggaacttcgccaagttccttgttgataaagaggggaatgttgttgatcgctatgcacccacaacttctcctctgagcattgagaaggacttgctgaagttgttggatgcatgaagttatgaatgtttggagttgccaataaataaactatgaataagaaatgtactgcagatgctgctgcaatttcctgtgtgccttatatgtaccgaaacagttgctcttgtagctttgacattagattcataaccatgagattgtgtacttattattgtgtgaatgtaaagttaagcttcctttaaaaaaaaaaaaaaaaaaaaaaaaaaaattaaagggctgaaatccgacatagtagcatcgtcagaccctgg

SEQ ID NO: 8039 - DNA, 875 bp, Glycine max
ttcgggacgaaatttgagatttgacaaagtatgaactcagatctcgagtttatttgagcacacccatccttctcattttcattatcttaccactttcaattccaaattcactctcagaaattagaatggctagccaatcaaacactaaatcagttcacgatttcacagttaaagatgccaggggaaatgatgttaatctcgccgattacaaaggaaaggtccttctccttgtcaatgttgcctcacaatgcggcttgactaattcaaactacacagagcttaatcaattgtatgagaaatacaaagggaaaggacttgaaattctggcattcccgtgcaatcagtttggggctcaggagccaggaactaatgaagagattgtggagtttgcttgtactcgcttcaaagctgagtttcccattttcgacaaggtggatgtgaatggtgacaatgctgctccactgtacaagtttctgaaatcaagcaaaggtggactctttggggatagtatcaaatggaacttctccaaattccttgttgataaggatgggaatgtcgttgaccgttatgcacccacaacttctcctctcagcattgagaaagacataaagaagctgctagatgcatgaataatgattagaataacatcatgaatgaataatgtactgcagatcagatattaattagtggaatttcctccgtatttgtactgaaacagttgctctgctcatgtacctctgaattactatttgcttgttcatctatataaaaatgtgtatcaatttatatataagcgaaattcattgcataaggttcattacaacaaaaaaaaaaaaaaaaaaaaaaaaaaaaaaaaaaaaaaaaaaaaaaaaaaa

SEQ ID NO: 8040 - DNA, 994 bp, Glycine max
ttccggaaaaacagaaaactagatccttgaattgtcagctacgtaggcccccccccccgacttgaaccactcgcatcttgttcctccgctcaacaactataataacatctttctctctccgaacagatcacactatggccacctcaagcgccaaatcagtccatgatttcaccgttaaagatgccaagggaaatgatattaatcttggtgactacaaaggaaaggtccttatcattgtcaatgttgcctcacaatgtggcttgactaattcaaattacactgagctcagtcagttgtatgagaaatacaaacagaaaggtctggaaattctggcatttccatgcaatcagtttggggcacaggagcctggatctaatgaacagatacaagagtttgtttgtactcgcttcaaggctgagtttcccgtttttgacaaggttgatgtgaatggtgacaaagctgctccactgtacaagtatctaaaatcaagcaaaggtggactctttggggatggtatcaaatggaacttctccaagttccttgttgataaagagggaaatgtggttgatcgctatgcacccacaacttctcctctgagcattgagaaggacttgctgaagttgttggatgcatgaatgaagctatgaatgactggagctgccaataaatgaattgtgattagaatataaattatgaataagaaatgtattgcagatgctgctgcaatttcctgtgtgccttgtatgtgtaccgaaacagttactcttgtagctctgacattaggttcataaccatgagattgtgtacttattattgtgtgaatgtaaacttaagcttcctttagccatgccagtgatctacctattccatttattggtttgcttcctggtcttattaccttgacgcaaaattgtctatgtctgtcttgtgaattgtgatatatgtgcaagattaactaccatgcagatggaaaaaaaaaaaactcgactggtgc

SEQ ID NO: 8041 - DNA, 2443 bp, Glycine max
  misc_feature (2438)..(2442): n is a, c, g, or t
cacaatctcattcgatcatcaatcctcactcgtggatttcaatctcgttcagttcctcccattttcatacacaaatcgttttctttatatttctgcattgctttgagtggattttgcataatcatattatcaatttttcattcattttgggatatgagtgcagaagtactcttgtgaaggttggaaaaaagaaatctcaatttgatgtatgaaccaggggtgtaagaagaagttgaggtgatggaaccccaggatgaagaagagatccataactgtttgatcaagctgagaagtaatccggaaaggcgaagggataaggtttacattggttgtggagctgggtttggtggtgacaagcccttggctgctcttaagttgcttcaaagagttcaagaactaaattatctggttcttgaatgcttggccgagcgaactcttgctgatcgttatcaaatcatgatgtctggtggtgatggttatgattctcagatttctaactggatgcatatgctgctgcctctggctttggaaagaggaacttgcataattaccaatatgggtgcaatggatcctctgggtgctcaacagaaggtcttagaaatagctaacagcctgggtctcaatgtttctgttgctgtggctcacgaggtgtctgtcactaatataataggttcaggattttcaccagcaaaatcatatatcatggagggtgtaagtatctgttctcacgacccatgaggctttctgtgttcacacacctacttgggagctgctcctattgttcattgccttgaaaagtaccaaccaaatgtaataattacatcgagaattgctgatgctgctttattcttagcacctatggtttatgagctaggatggaactgggatgaattagaacatctagctcaaggatctttggctggccatcttctagaatggtggtgccaactcacagggggatatttcatgcatccaggagacaagtaccgagatatgtccttccagcaactactggatttatcactgccttatgctgaaatctgttttgatggccaagtatgtgtatcaaagtctgaaggaagtgggggagttttaaattttaatacatgtgctgaacaattactatatgaggttggagaccctggggctcagctacgtaggcccccccccccccccgtgattgattttcaggatgtttctttccttccattatcaagctctagagtttgctgtcatggagcaaaaccatctactatttcagttcctgataagcttttgcagttggttccacaggattgtggatggaaaggatggggagagatatcttatggaggttatgaatgtgttaaacgtgctaaagcagcagaatatctgtactggatataagaaagagactcttctagagaaacacttggtaaagcgggaagatgttttctggcgaactgggataaagaggagcacaagaagtcagtcaaataaagtagttgatcctgaccacaatctgaggcacatattgacattgccaccgaagctacaagctgaaacagacaaatccttggaatctgtttctcttggtagtagttgctcacctgctccatctggccagaagattccactttacagtgtagcacacagcagagctggagataaaggaaatgacattaatttttccctcatcccacattttcctcctgattatgagaggttgaaactaattattacatctcaatgggtaaaatcagtggtctccaatcttctggatttgtccctttctcctgatttagatgcaaaaattccaagagataaacgggtcaatgaaaatgttaaggtggagatatatgaagtcaagggaatccagtcattaaacattgttgttaggaacatactggatggtggtgtcaactgttctcgacgaattgatcggcatggaaagaccatttcagatctcattctgtgtcagcaagttgtgttgcctccttgattgtgtgatttactaataaggtggcaatgttctcctgaatggaatgaatagagcattgcaaaacttagaatgatagaatttattgaagcttggaagtgctttaattgaagtaggactcatatggggagggaggattccattttgtgctctttagcctacatattcttatgataataattagcaaaagctgtgctgtagccacatcatcctttttaaagattatggtgggaagcattttgatctttagattatgttgtttctttttctttgtaatctactacataactagcttctattttattttttaaactttgttctgtagtttgagaactaagttttttggcttagtagaaatttgagaagttagagaaagatggagaaaagacattaagatgtaccaagaagagcaccaacacaagtgagattaactcatacactatacttaaattagtgagannnnna

SEQ ID NO: 8042 - DNA, 1383 bp, Glycine max
ctcgcgccccgtcgccgcgcgattggaaatgtttgatggtgaataatatgattgtgcagatacaccatggccgtcttagtgaaaatgactctagaagatatttccagcagcttattgacggtgtagattattgccacagtaagggagtttatcacagagatttaaagcctgaaaatcttttactcgattcactaggaaatataaagatttccgattttggtttgagtgcatttcctgagcagggggtgagtatccttcggacaacttgtgggactccaaactatgtggctcctgaggtactcagtcataagggttacaacggtgctgtggcagatgtttggtcctgtggggttatcctctatgtcctactggctggatatcttccttttgatgagcttgatctaaccaccttatatagtaagattgagagagcagagttttcatgccctccttggtttccagtgggagcaaaattgttgatacatagaattttggacccaaatcctgaaactcgtataacaattgagcagataagaaatgacgaatggtttcagaggagttatgttcctgtcagtcttcttgagtatgaagatgtaaaccttgatgatgtaaatgctgcttttgacgatgctgaggaaccgagggctgatcaacaatgtgacaacgatgacatgggtcctctaatgcttaatgcatttgacttgataattttgtctcaaggcttaaatcttgcaacaatctttgatcgtgggcaggactctgtgaagtaccaaacccgttttatctctcaaaaaccagcaaaggtggttttatcaagtatggaagttgtggcacaatcaatgggatttaagacgcatattcgcaactacaagatgagggtggagggtgtttcagcaaataaaacatcctatttctctgttatcctggaaatttttgaagtggctcctacattttatatggtggacattcagaaagcagctggagatactggtgaatacctcaagttttacaagaacttttgtagcaatcttgaggatataatctggaaaccgccccatgaagcaagcaaatcaaggatctccaagaccaaaagcaaaagacgatagtttcatcattcgtgataccttctgatttgattgaaaagaaaagagagaaaaaaaaagtaatatggaacacatgcttttaatttaaagagggtttgacatatagacgcatgtcccaccaaatcgaggtataaatacggtttgccctggcttttttttttaacagcaatactgttttttccacttttaattctccaaataccacacttgaaacttgaaagattgtgtcccaaaatttactagtaattttctagaccccaggaaatcgatttctcccgtc

SEQ ID NO: 8043 - DNA, 1597 bp, Glycine max
cgttcgcttgggcggacgcgtgggcgaaaaaaaaccagattacgtttgcattgagttgcgctgttccttcctcctgttgttcgtatttatttcatttacgccgccgtcgtctccgccgcagagagcgatgtcttccgtcgaaacggagatggagccactcacgtcgggggccagcaaccgcataattccgctcctcaaggccctcagagcctccctcatcttcgtctacaccttcttcctctccttcctcctcttcgtcctcccccgccgccgccgcctctcccccgcggcggggccgccctctccgaagaagcatttgaggcggcgctggctcgtgcgcgaggaggaggacacgtgccgcagaagggcgctggcgcaggacgtgggaatgggtcgcgacgaagggtggtaccgctggagcacttccatcttctacggggttcggaacaacgctctgttttgccggtcgtggttcccggttgccggtgatgttaagggcattctaatcatcattcacgggcttaatgaacacagtggaagatatgcggactttgcaaggcaattaacatcatgcaactttggtgtctatgcaatggactggataggtcatggaggtagtgatggattgcatggttatgttccatctcttgatcatgtggttgtagatacgggggctttcctggaaaagattagatcggagaatcctgggataccatgctttctctttggtcactccactgggggagctgtggtcttgaaagcggcttcccatcctcatattgaagtaatggtggaaggaattatattaacctcaccagctttacgtgtgaagccagctcatcctattgttggtgctgtagctccaattttttctctggtagctcctaggttccaattcaaaggagcaaacaaaaggggcattccagtttcgagggatccagcggctttgttggcgaagtactctgatcctttggtctacacaggacctataagggtacgaactggccacgaaatattgcggatatcctcgtacttaatgcgaaacttcaactctgtgactgtgccattctttgtcctgcacggaactgctgataaggtgactgatccactggcctcacaagatctatatgataaggcagcttcaaagttcaaagacataaagctttacgacggcttcttgcacgaccttctgtttgagcctgagcgtgaagagatagctcaggacattatcaactggatggaaaagagattatttactatttgaaaatgttagtatatatatatatatatatatgggggggttaataggaaagggaagacacaagggaagaaaaagggatgccatgtttgtaagtgtagaaaattgaagtcgccctgggaaatggggggaggcggatgcagataggtttattcatcttttcattttagtgttttgaatatatgtatcgtgtgaagatctttgttttatcaagaaacttgtacattttatagacttaaatatttcagtagtgtttccatttctccagatccagcattctttcaatttgtgatctgtgtaggctcgtatacatatttgccatttttgtatgttgctttt

SEQ ID NO: 8044 - DNA, 1547 bp, Glycine max
tcagctacgtaggcccccccccccgatgtttgcttgttcctaaattacaattttcaaagccagacagacaaacatgtccgagaatattgagtccaattctccttcgctttccctctttatctgaaagctataagtcccatgttttgtgtgaaagagtgtgcgactgtcgctgaattctgtgctctgctgttgaaactgtggttttcgatttcctggttttggaagtgatcacttggctaatctattcgattgggagattaaattcgtatggagtgttttgacttctggaagagataatggtgcagtgcctagacggattaaagcatttgtgtgctgctctggtaaattgttgtgatgccgattcgtcaaagcaacctacaggtttagaaaatccagaagttcttgcaagagaaacagtgtttagtgtaagtgagattgaagcgctatatgaattgttcaagaagatcagcagtgcagtgattgatgacggactaattaataaggaagaatttcagttggcattgttcaagacgaacaagaaagagagcttatttgcagatagggtgtttgacttgtttgatacaaagcacaacgggatacttgattttgaagagtttgcacgagctctctctgtctttcatcccaatgcaccaattgatgataagattgagttttcattccaattgtatgatctcaaacagcaaggttttattgaaaggcaggaggtaaaacaaatggtagtggccactctagccgaatctggcatgaatctttcagatgatgtgatcgaaagtattattgacaagacatttgaggaagctgataccaaacatgatgggaagattgacaaggaagaatggcgaaaccttgtcttgcggcatccatcccttctgaaaaatatgactcttcaatatctcaaagatatcaccactacatttcccagttttgtttttcactcacaagttgatgatacttgaggcaaactacagcatccatgtcagtttcagtgttcttgactgggaatggtcttcgattgacttgtgaatgatgaccgggttctatgtgaaggattcggtacggggtggatatggagtttatttatattttcattacaagtagaactttgtcttcccgtttttggatggatgaggtttgtagattgaacaaatgggtttgattatttatttatttgcttcatttgagaataaaagggggaacaaaatagaatattcaggcatttcagcattagcactttggaattaattttggtgagaaatatgtttaccataagtcttgtgcaattgcttcagcaatctgtgaagagttctttgagcacatgccctgggttgagaattgctgctccaaaaaacttaagtgcatgtcagttgttgtgcttaaagccaactctagctttcctccttgacagaaagataatgcccctctctatccaatttatttcactcttatatttgccattatttttggctaggctattgatgattaaaaaaaaaaaaaaaaagtatgttttctgtaattacattttttgc

SEQ ID NO: 8045 - DNA, 1847 bp, Glycine max
tatcgagccgtctccgcgcccgacggctgcgagaagacgacagacggcgggacaacatcaacctaatccagtttcgttattcgcccgacacattttttctccgatcccctattcctctccattctccgttgtgtcgatttttgttactcaaaagggaaattgatttgatagatagacagatagatcgtttctatgggttaaagtgaaatccgaatccgaatctgaatctgaatctgatccaatcattttcatgttagggcgtgcgatctccaatcaagcgcggttgtgtttaggtttcattttgttgggcgtgtgagtcgtagggggtttcgaagagcatagaataatgccttcggtgcccgttgatctccgtctagttccttctttgaccgttttccatggtggatcctcttttcatcgtctgaaaaatcttgaaaaaagtgatcggcgtggtaatcttagttaacactaggtctttcgttttcttccaccttctctttcttttctcgctctcttttggtcgtcgttgttgttggttctgctctgagcgagctgtgattaattcgtcagcggatcgggatcgagggtttgctattgttgttctttctgggtttggttgctattctctgctcctgttttgatagtgttgtagttgcagctccaaacgtcgttttataagtacctgatgctattgatggacacgtgctctaataccaatgttgtgcatgacgacaacttcataagtaatcttggaaggacttttagtgagtcattacacattcaagatgctcagaaatctttacttgcggctcgggggagtgacatctataatgtgaatgaggaaaaaatatgtaaagcaatgaaagatcaagcgacaaaagtaaatatggcgtgcttgaaaaaatctgcaacctttccaattcctaataccatgttgccttcaagctcgtctgataaggaggctgatacttcagtcacagaaccactctatgagcattctgctcatcaaacttactcacgctctgtatctctgcctgctcctctgaagcttatacctgccataaaaggtagccgtgagaaacatgggggttcacaggtgaaattgaatgtgaaatgggccgctgatgtgtatgatccagtgcctacattgttatctcacactgtaagaagcaacaagaagcaacagaaatccaggaagaagaagcctgaaaagaagaatggaaagaagggtcaaaaaggaaattcatctcgtgggggcagcagcaaagataagcagtttcgcaagctaggtgggacttctggtttgtgctacaagtcaatggattcttgtgataaagtgcttggagttgctactgaattagatgctcttgatgttcgaagccaggattcgtactgtggaactagcttccttaaaaaatcagttactgaactgcactactcggttgcagaagcactatgagtgaaatactctgaatgtcttttcttatttccttcatcgtacataaataagctatattttgctgttggcttgtttggtggaaaaaaaaaaaaagacatgggattgtatggtgaaagctatttggtaactctttagagtacatgcagtcaagattggcatttttatttgtgatgtgggacaagtttttttggtagatgaggtcgtgtctagcctttccagtcattaattctagtgagggatctctgctgaagtggtgttcttttgttgataacctctgtatcgttggatttgtgttttgattatattgtcgtttgatgataaaaaaaaaaaacatttaaataattaccacaatagggattttacaaccaaaaaaaaaaaaacccggggg

SEQ ID NO: 8046 - DNA, 2767 bp, Glycine max
  misc_feature (1105)..(1105): n is a, c, g, or t
acccccccgcgtccagtttcgttattcgcccgacacattttttctccgatcccctattcctctccattctccgtcgtgtcgatttttgttactcaaaagggaaattgatttgatagatagacagatagatcgtttctatgggttaaagtgaaatccgaatctgaatctgaatctgatctaatcattttcatgttagggcgtgcgatctccaatcaagcgcggttgtgtttaggtttcattttgttgggcgtgtgagtcgtagggggtttcgaagagcatagaataatgccttcggtgcccgttgatctccgtctagttccttctttgaccgttttccatggtggatcctcttttcatcgtctgaaaaatcttgaaaaaagtgatcggcgtggtaatcttagttaacactaggtctttcgttttcttccaccttctctttcttttctcgctctcttttggtcgtcgttgttgttggttctgctctgagcgagctgtgattaattcgtcagcggatcgggatcgagggtttgctattgttgttctttctgtgtttggttgctattctctgctcctgttttgatagtgttgtagttgcagctccaaacgtcgttttataagttgcctcttagtacctgatgcaattgatggacacgtgctctaataccaatgttgtgcatgacgacaacttcataagtaatcttggaaggacttttagtgagtcattacacattcaagatgctcagaaatctttacttgcttctgaggggagtgacatctataatgtgaatgaggaaaaaatatgtaaagcaatgaaagatcaagcgacaaaagtaaatatggcgtgcttgaaaaaatctgcaacctttccaattcctaataccatgttgccttcaagctcgtctgataaggaggctgatacttcagtcacagaaccactctatgagcattctgctcatcaaacttactcacgctctgtatctctgcctgctcctctgaagctatattacttggctgttagtaaagtttgaaggtatagtttgtaagcaatgtatgcttttgctcaatgagaaaatactgaaattttagaaaggattgttggactcgngtttctttattcctgtgtcttatgtcaacaattttcagtagaaaatgtttgcataaatgcataacgtaaaaatacaaacaaatcaatgccctgtagggagtacagaaaggtttgttggtatattgtaagcatttatgcaaatattttctatttatgtaaagggcaatttggttcttgaggctcccacctatgtatcacatatgcagtaacacagacttatcctggtaagtgaagagccaatttttcaggattgaatgtgacctaggtcacaagcaaagcagcaaccttactggtgatgggttgcactcaagtgtttctagttgtgtatcacatggaaaattatattttaagcatttaaccaatggttacaaacacacgaccccccccccccttttctcattttttgttgtattggaacaatggaaattttggaaccagaggcatcggtttttcggttgcaactgaaaagattaatgtattcaatgctgttaattactttgttttgagagtatcatgatttaagttatatttcggattctgtctttatgtttttggttaggtttttgagtttctattgacaatgggataagtaaatcttgtaaaggttagtatgttacaactttgtctctgtaacatttccctttctatttggctcctcctgctagaagtgaggtttgaagggattagaaaattttcaccttactatatatgcattcaagacaggtgatgcttgatagaatcgtattctgtgaagtatagtttttggctcataaatatggactaatatctatcttattcttaacacgtgcctattcttcattaatggcttccatttatttctgtatttttataccacaggctcctctgaagcttatacctgccataaaaggtagccgtgagaaacatgggggttcacaggtgaaattgaatgtgaaatgggccgctgatgtgtatgatccagtgcctacattgttatctcacactgtaagaagcaacaagaagcaacagaaatccaggaagaagaagcctgaaaagaagaatggaaagaagggtcaaaaaggaaattcatctcgtgggggcagcagcaaagataagcagtttcgcaagctaggtgggacttctggtttgtgctacaagtcaatggattcttgtgataaagtgcttggagttgctactgaattagatgctcttgatgttcgaagccaggattcgtactgtggaactagcttccttaaaaaatcagttactgaactgcactactcggttgcagaagcactatgagtgaaatactctgaatgtcttttcttatttccttcatcgtacataaataagctatattttgctgttggcttgtttggtggaaaaaaaaaaaaagacatgggattgtatggtgaaagctatttggtaactctttagagtacatgcagtcaagattggcatttttatttgtgatgtgggacaagttttttggtagatgaggtcgtgtctagcctttccagtcattaattctagtgagggatctctgaagtggtgttcttttgttgataacctctgtatcgttggatttgtgttttgattatattgtcgtttgatgataaatggtgctgctaaaatcttgactcacttgactccctaggggggggggggaggggaggggggcgg

SEQ ID NO: 8047 - DNA, 2585 bp, Glycine max
gggctggttcgctgcttgtcactcctgccatggaataaagaagaaactgatttgcacaataaggatgctactggacaaagggtattgcatgcctttgaagttgatgtgtctatgagctctaatggtttttcttatatcataaagaatttgaaggatctagtgccagtattaataaatagtttcctggaatttattccattggttcatgctatggaaagtcttgaagggaagtcttttggttgtatgatatccattcttcatagcatatatcttatagtcaggtctattgcttatgggactgataaggattcagaatccccaagttctcaaggtggacctgatgcagctgtatgggatgttaacatctcttctacattcttgaagaaattatttcctcgtttccccctcaacccggttgatcatctttctgaaaaggattgtgataggttgtttgacttgaacatgatcgttgccaaaatattttttgaattaaatgaatggacgagtcttcctcctaatttgttggagacatttctagaattttttgaaaatgctttgcttgggaagttctgcagggctacacagtctggtaaggctgtctgggaagagtgtttagttcagctcctttcatttattcctaaatttctttcacgtggggcaagctcttggacatcacgtcttcttcaggcttttacccagacatttagggaaagcaagccaggttccttgctgaaattggcctgtgtttctgctattgaagatatgctaactcctattgaaagcatgctttccatagagacaagcaatccagaaaatttagaacttcaagatgctttactcgcatggattagagagctccctctgttgcttatccagcttggagataaacacccaacctgctcccaggttgtgttacgccttcaacttcgtattggacaatgttctttgttgaattcatcacttgtttgtatgtatgacaacacacagtactcattgctagatttttattgtacatgtcaaggaggacagatatgttatggtccttttctcaggcttcctagagaatctcaagagctctctttatgttccctttactatttctcttatttggacctgcctattttaaagtcaatagcttgttgttgcctaagtgcagatctagatccctatgtgttattgaggatcatagaggttctccattcagcctatagagatggacatataaaaattgcagattacttgagtgttttcatcaccttggtcttgcgtttcaaacgtccccctgaaatcggttctgctggttttaagagtgatccactctgccaaactttgaagtcaatgacaactgttctttgctcatacatggcacagatgggtgacaattctcttgttctgcagatagtagagaaagtggtaattgatcagataccacaaatgccttctttggataatagttgctctctcctgagaatgcttgttacagtggattccaagcccacaagactttctgaacaaagcattatcattctaggccagcatctttctgaatatctgatggatgctgtgcggggcattccagaagatggtgatgaacaggggactccctccattcaattaagtactcagcattattatctcctaccttgttttttcttgtttgatcggtgccataaacttatgaatcttgtgttgaagagaatgggatcagctataactgaaagtagtttgtcaccaatatctgataaatgcactcaacatacaaggaactgtttggatagagtgaatgctgtcacttctgtactttttttgatgcacaaggatgctaaattgcaaccgattatgtctttattcaaggaagatattgataacgtcatacataaagttttttctttaaagacatcagggcggatcagtacgacaattgaagaaaggcatgaaatacaatgtgcatttgaacgactgaaaatcttaacgggataacaattgtcaagaaggatgttctgaattgagaaactggttcatgatatttgcaggcatcgttggcatagaagggagttttttttgtcaaattgacagacagaggacatggactgagctctggggtgtaatttgatctctctccatatgtgtgcgccctttttgtcttagattgcttccgagttgtaactttttctctctaacttgcggtgaagtctggatcaaaactggtaaactttgttagggtaaacgcggcatcagttttattactctcagagcatacttggcattggcatcctcatctactaacctacttctcccaagtttaatttgcaagcagttttgaggcctgcctgcagcaggcactttatttcactttggagaaatctaaagtttgcatgcagcctcagttttgtttcactgtgtttctattagctagcctcgtgatgagcgtcaatggcttagacacagtagatattatagttttcgtgttaattttctttcctatacaagtatacaacaatagtgttaagactaaagatttctgaccaaaattttgatgatagtataactttatatgagattatttaaagtaatttaacaaaaaa

SEQ ID NO: 8048 - DNA, 1733 bp, Glycine max
gttttgcattccacgagtggctcgtgggtgaggtgaactcgcacgtgtggagggtgttaggtagaaggaactaggaagagaggcagcgcacgaggtggtagcactacatgtttcttttcattcattgttgaacttcaacttcaacttcaacttgaacttgttgcatttggatctcatggcagaagaagcactactgcaaaacaagcaggttctattcaaagggtacatagatggtgttcctaaagaaaccgatatggaactcaaggtcgactcacatattgcgctcaagcctcccccacaaggctcatcagctattctcgttaagaacctttatctctcttgcgatccatacatgcgcggtcgcatgcgtgatttccacggatcttatatccctccttttcttccagcccaggcacttgaaggatttggtgtgtctaaagttatacactctgataatccaaattacaagcctggtgatttcattaccggcttcactggctgggaagaatatagcctcatccaaagaactgaacagctccgaaaaattcaccccgatgatgccattcctctctccttccacgtcggtcttcttggaatgccaggttttactgcttatgcaggattttatgaggtcagcaccccaagcaagggagaatatgtttttgtatctgcagcatctggtgccgtaggtcagcttgtaggccaacttgctaagttgcatggctgctatgtagttggaagtgctgggtcaaaggaaaaggttgaccttctaaagaacaagcttgggttcgatgaagcttttaattacaaggaagaattagacttgaatgcagctctacaaagatatttcccgcaaggcattgacatctactttgacaatgtgggtggggatatgctcgatgctgcactccttaacatgaggattcatggtagaattgcagtttgtgggatggtatctcagcaaagcctttccaagcccatagggatatacaatttattcaacctcattacaaagcgcatcaaaatgcagggttttttgcaaagtgattacttgcacctatacccgcgctttttggaagatgtttcaagttactacaagcaaggaaagattgtgtatattgaagacatgaatgaaggcttggaaagtgctccagctgctttcgttggacttttccatggcaagaacgttggtaagcaagtcattcgtgttgcccatgaatgattttttcagtatttggttagctgaagcttgatatgttttaaacatattcaattgagaatttttggatgttcttgaactgtgtcagctggcaaggccttattctcaccttctgccttgagcagaaaatgtaaacttttcagtatgccttaattatgtagaaaataaagtagctgcattaggtggatattggatcttctaaaataatgagatatgtaaaatgagaaaatcaacagtagatacgttcatgcgatctcagtttgtaatcctcacttaagagacaaagctaaatttgcatctggtttggttgaattacaaagaaaatgattgaaactgtgaaagaaatagatgagaggtatagacctaccaatttcaaggaacaaaaacaaaaaaaaaaaagatcagttgaaattagataacttcaccatatcagatgatcatgatatagaaagattaaatgtggttgcagtccacgataattcgctggccattttggaacccgactattcagggg

SEQ ID NO: 8049 - DNA, 940 bp, Glycine max
  misc_feature (920)..(920): n is a, c, g, or t
gagcggctcgagcggctcgagcaaattcttaaataaaagtgcccccattttcccaaaatcaccatctagagttttctcttttccactgaaaatcaaattagggtttggatttcggaattgccacagaatcatggccactctgaaagagcttcttcctcctgcaaaatcctcctccaccgcctactacgaccacaccaacgatccatggttcaagcagcgtttctcctcagaagaggaggagaaatccgccgccgccgccgccgccaagcagaagcccgttcccccctacctgaagcgcgccggcttcgttcctcggaaaatcgaggacttcggagacggcggcgccttccctgagatccacgttgcacagtatcctctcgacatgggaagagaaaagtccggcgccaaacctggatccaaaatcctccctgtcaccgtcgacgctaacggcaacgttgcctacgatgccatcgtgaggcaaaacgagaacgcaagaaaaattgtctacacgcagcagaaggatcttatccctaagtttctcaagaacgacgaagatgacgacgacgtcgtttccgacgacgaagcacagaaacagatcgaggaaacgatgcaggagaccaaggccgctttggagaaaatcgtgaacgttaggttaagcgctgcgcaaccgaagaatgttccgaagcagaactccgatgcgaagtatataaagtacaaaccctcgcagcaatccgatgcgttcaattcgggtgctaaggagagggttattaggatggttgagatgccggtggatccgcttgagcctccgaagttcaagcacaagcgtgttcccaaggcgtcggggtctccgccggtgccggtgatgcactccccgccgaggccggtgacggtgaaggaccagcaggattggaagattcctncttgcatctcgaattggaag

SEQ ID NO: 8050 - DNA, 1697 bp, Glycine max
acgacagaagggggacgtaagattttagtattgtcaggggtagtgtcggtgatgaagtaactagaataaatcagctacgtaggcccccccccccgttcttcatgtttcacttctgctttaagtttgtggctttctactttctctttctagagtaggactaaactcatacactgatcatgggagtggatttaagacaagtggtggcgggtgtcctcaccctcacaatgttcgtcatgcttatacacatgatcaaaagagaccattttgatgctgttgatgataaacttcctggaacggaggatgtcagctttgaaagtacaaactttgatactactcatgttagaaagaacatcgggatttggaagggagatggtgatgagttaaaaccatgttggcttaagccatctgaagataacgtggatcagactgaggggtttgttaccttttctttaaccaatggcccggagtaccatatatctcagatagcagatgcagtgcttgttgctcgtagtcttggggcgacacttgtcatccctgacattagaggaagccaacctggtgacaagaggaactttgaggacatttacgatgtcgatgtgttcatgaaaagcatggaaggagtggtcagagtgttaaaggatcttccttctcatgtatcaacacataaaattgccgccgtgaaggttcctaatcgggttacagaagactacatagctcaacatgttgaacctatttatagatcaaaggggagtgtcaggcttgctacttattttccttcaataaacatgagaaaagcaggggaaaaaagtgatgctgattctgttgcatgcttagcaatgtatggaagcttagagttgcagcaagaaacgcacgaccttgttgactcaatggttgaaagacttaggactttaagccgaaagtcagatggccaatttatagctgtggatctgagggttgagatgttggataagaagggttgtcaaggaagggatagtgaaaaagagaagagctgcttcaatgcacaagaggttgcagtgtttttgaggaagattggttttgaaaaggatactacaatctatgtgacacaatcaaggtgggatgaaagccttgactctcttaaagatttgttccctaaaacgtatacaaaggaatccatcattcctgcagataagaagaaaaggtacctagactctgaagattctgagttggagaaagtgattgacttttatattagttctgagagtgatgttttcgtaccggcaatatcaggtctattttatgcaaatgtagctggtaagagaatcggctcgggtaaatcccagatactggttccggccaatattccagattcatctgcttctgcctccagtttcttgtcccattatgtctccaagaaaaaccactttgcctattcttgttactgttagttcgaagtgaagacattcttagcatccagtgggtaatgttgtgtaccaattgtactgaatgatgctttccaaaatgtaccctttcgggaatttcagtgttatggcctaaggcctcttgtttgagtgttcaccaaaaaattcaagttactgtgatttgacatgtacacagggctttctgaacggatatttagtttgttaaattatggttgcccccatatttatttttcatagctggtgaaacaattgatagccctttcattgttaaggggg

SEQ ID NO: 8051 - DNA, 1610 bp, Glycine max
  misc_feature (715)..(718): n is a, c, g, or t
cttctattttctataatctgtatctttagaagctttgcttcttaatatctatgtcatgtttatttgtgtcctctcaaccctccttcaaacagattccgttccagggtgacgctagaaaaggccagccaaatttaaagtcaaaaactggaaaaatgactcaaggttctctgcttttaaaatggaaagcacttttctaatttgttatttcaggctccattggcattgctagcttgttttggatgtagcttaatttgaaaatgctatattctgatgaacattgttaaatagctgacaggtgaactcaatttgaaatcagtctaatttactgtgtttacagatacacttgcatgtacctaatataatttatgtctcaggaactttgaggacatttatgatgccaatgtgttcatgaaaagcatggaaggagtggtcagagtggtaaaggatcttccttctcatgtaacaacacataaaattgctgcggtcaaggttcccaatcgggttacagaagaatacatagctcaacatgttgaacctatttatagatcaaaggggagtgtaaggcttgctacttattttccttcaataaacatgaaaaaagcaggggaaaaaagtgatgctgattctgttgcatgcttagcaatgtatggaagcttagagttgcagcaagaaacgcacgaccttgttgactcaatggttgaaagacttaagactnnnngccgaaagtcagatgggcaatccctcgcggccgatttgagggttgagatgttgaataagaagggtgcccaaggaagtgatagtgaaaaagagaagagctgctttaatgcacaagaggttgcagtgtttttgaggaagattggttttgaaaaggatactacaatctatgtgacacaatcaaggtgggatgaaagcctagattctcttaaagatttgttccctaaaacatatacaaaggaatccatcattcccgcagataaaaagaaaaagttcctagactctgaagattctgagttggagaaagtgattgacttttatattagttctgagagtgatgttttcgtaccagcaatatcaggtctattttatgcaaatgtagctggtaagagaattggctctggtaaatcccagatactggttccggctaatattccagattcatctgcttctgcctccagtttcttgtcccattatgtctccaagaaaaaccactttgcctattcttgttactgttagttcgaagtgaagacattcgtagcatccagtagcaaatgttgtgtactaattgtcctgaatgatgatgctttccaaaatgtaccctttcgggaatttcagttatggcctaaggcttcttgtttgactgttcaccaaaaaaattgaagttactgtcatttgacatgtacacagggctttctgaacggatatttagtttgtaaaattatggttgcccccatatttatttttcataactggtgaaacaattgataggccatttattgggttgtcttagataaaacattgttttaggggagggtattgatgtttcaaaaagcaaataaacatgggcaatggacccaaaccaaaaaaaagaaaccagagtttttttttgtccc

SEQ ID NO: 8052 - DNA, 1150 bp, Glycine max
aaatactagcaagtggtattaattagttgatacaaaaggcaacgaaagattttacgaagcacatatctttgtcaggggtagtgtcggtgatgaagtaaggaaacagtttctctcaccagtcaccactacaataaatatagttacaacatcaacttgggttttttgtcttagtgtcccacacctccatgtgctgctcaagcttcttctgtttcacttctacttgaagtttataactgctcctcaattctaatctcgccttccccatttatatatcttctactttctagagtaagagtagctacactcatacacaccacacaacacagatcatgggagtggatttaaggcaagtggtggcgggtgtgctcaccctcacaatgttcgtcatgcttattcacatgatcaaaagggaccattttgatgctgttcatgataaacttcctggaacagaggatgtcggctttgaaagtacaaactttgatactactcatgttagaaagaacatcgggatttggaagggagatgctgatgagttaaacccatgttgggctaagccatctgaagacaatgcggagactgaggggtttgttaccttttcactaaccaatggcccagagtaccatatatctcagatagcagatgcagtgcttgttgctcgcagtcttggggcgacacttgtcatccctgacattagaggaagccaacctggtgacaagaggaactttgaggacatttatgatgccaatgtgttcatgaaaagcatggaaggagtggtcagagtggtaaaggatcttccttctcatgtaacaacacataaaattgctgcggtcaaggttcccaatcgggttacagaagaatacatagctcaacatgttgaacctatttatagatcaaaggggagtgtaaggcttgctacttattttccttcaataaacatgaaaaaagcaggggaaaaaagtgatgctgattctgttgcatgcttagcaatgtatggaagcttagagttgcagcaagaaacgcacgaccttgttgactcaatgggtgaaagacttaagactttaagccgaaagtcagatgggcaatttatagctgtggatttgagggttgagatgttgaataagaggggttgccaaggaagtgtagtgaaaaa

SEQ ID NO: 8053 - DNA, 1429 bp, Glycine max
tttcccacgcgtccgtacggctgcgagaagacgacagaaggggaaacaaacaatagaaaagcgaaaacaaatgtcattttcgaggttattgagagtccagaatcctggtctctgtctactcttcaattattcccaacctctcacctcttcatcttcttcttccttacctttgaccagagacagagcagcactcacattcacaacgaaggtttcctattcatcagacatggtgaaggcaatcagagttcacgaactcggtggccctcaagttctgaagtgggaggatgtggaaattggagatccaaaagaaggcgaggtccgtgtgaggaacaaagccattggggttaatttcattgatgtctactttcgcaaaggagtttacaaagccccttcttttcccttcactccaggtatggaagctgttggggttgtgacagctgtgggtgctggactcactggtaggcaggttggagatcttgtagcttatgcaggtcaaccaatgggttcatatgctgaagagcagatacttcctgcaaataaagtagtccctgttccttcgtcaattgacccagctgttgcagcatccatcattctcaagggcatgacaactcagtttttgcttcggcgctgtttccaggttgaacccggtcatacaattcttgtccatgcagcagctggcggagttggatccctattgtgtcagtgggcaaatgctcttggtgcaactgttataggaactgtatccaataaagagaaggcagctcaagccaaggaggatggctgtcatcatgttataatctacaaagaagaggattttgttgcccgtgtcaatgaaattacatctggcaatggagttgaagtagtctatgattctgtaggaaaggatacatttgagggatctttggcatgcttgaagcttaggggctacatggtaagttttgggcagtcatctggttcacctgatccggttccattatcttccctggctgcaaaatcccttttcttgactaggcctagtctaatgcaatatgttgtcactcgggatgagctgttggaggctgctggagaggtgtttgctaacgttgcttctggtgtgttgaaggtccgtgttaatcatacttacccattgtctgaggctgcaaaagcacacgaagacctggagaatcgaaagacatcaggatctgttgtgttgataccctaagactctcagttgtgtatgtgttatacaccaagtccttgtttgcttcctcttgaaaagaactctttattatgaatgatattgctaatgtatgttgtttaccatgaatcattgtacttaaataatgatttctctgttgactttggttaaagagtacttttctcatcttagtatcttgacatataaaccccaaaaaaaaaaaaaaaaaaaaaaaaaaaaaaaaaaaaaaaa

SEQ ID NO: 8054 - DNA, 1715 bp, Glycine max
  misc_feature (82)..(85): n is a, c, g, or t
  misc_feature (88)..(88): n is a, c, g, or t
actgagtatacgattgaggaaaaagtcattgaaagggcttacaaaaagcttgctcttgatgctctggtgattcagcaagggnnnntanctgaacagaagactgttaataaagatgagttgcttcaaatggttagatttggtgctgaaatggtttttagttccaaggacagtacaattacagatgaggatattgacagaattattgctaaaggagaggaagcaacagctgagcttgatgctaagatgaaaaaatttactgaagatgctatcaaatttaagatggatgacactgctgagttgtatgattttgacgatgagaatgaagagaacaaatttgatttcaaaaaaattgtgagtgaaaattgggtcgagccaccaagaagagaacggaagcgcaattactcggagtctgaatacttcaagcaaacaatgcgccaaggtggccctactaaaccaaaagagcctcgtattcctaggatgcctcaattgcatgacttccagtttttcaacacacacaggctgagtgagctgtatgaaaaggaagttcgatacctcatgcaaacacatcagaagaatcaggtgaaagattccatagatgttgatgaaccagaagagatgggagttccattgactgccgaagagttagaagaaaaggagcagttgctagaggagggattttcatcatggagccggaaggattttaatgctttcattagggcctgtgaaaagtatggccgaaatgatataaaaggtattgcttctgagatggaaggaaaaacacaagaggaagttgaaagatatgcaaaagtcttcaaagaaagatacaaggaattaaatgattatgatagaattattaaaaacattgaaagaggggaggcaagaatatcccggaaagatgagatcatgaaagctattgggaagaagttggaccgctacaggaatccttggcttgaattgaagatacaatatggacaaaacaaagggaagttatacaatgaagaatgtgaccgattcatgatttgtatgattcacaaacttggctatggtaattgggatgagttgaaggcagcttttcgaatgtcgcccttgtttcgatttgattggtttgtcaagtctcgcacaacacaggaaattacaaggaggtgtgacaccctcattcggctggtagagaaggaaaatcaagaatatgatgagagggagaggcaagctcgtaaagagaagaaacttgctgctaagagcatgaccccgtcgaagcgttccatgcctagacagactgagagtccatctctgaagaagcggaagcagttaaccatggatgactatttgagctcggggaagaagaaaaaataaatgggcgtatgcgtatattttactttgggtaaagcggggcggatgatgcggcgattttgatatgggcctagctgacatttcaagtgatggcctggtgtgacttcccaagtccgtgattttttgtgggcctgaatataatgtttgaatattgaaattttgtaaatttactaacaaaccgatagattagatgtttatttattgttaactgcagccaattcaacatatttaatgttgctattcttcaacctagtgttttttaattcatacttaaggcttaattactgttttagattttcaatttgaggtcttatttttatttttttaattgttataattgatatttaaagccgtccgtgttgaaaatt

SEQ ID NO: 8055 - DNA, 1187 bp, Glycine max
  misc_feature (1180)..(1185): n is a, c, g, or t
tattttataaaattgcagcaaacacaccagaagaatcagataaaggattcaatagatgttgatgaaccgggagccggtgggcccgatccatcgacccgctgcagtccgttggaagaaaaggagcgcttgctagaagagggattttcttcatggagccggagggattttaatactttcattagggcctgcgaaaaatatggccgaaatgatatacaaagtattgcttctgagatggaaggaaaaaccgaggaggaagttgaaagatatgcaaaggtctttaaagaaagatacaaggaattaaatgattatgacagaattattaaaaacattgaaaggggggaggcaagaatttctcggaaagatgagatcatgaaagctattggaaagaagttggaccgctacaagaatccgtggctagagttgaagatacagtatgggcaaaacaaagggaagttgtacaatgaagaatgtgacagattcatgatatgcatggtgcacaaacttggctatgggaactgggatgagttaaaggcagcatttcgaacatcacccttgtttcgatttgattggtttgtcaaatctcgcaccactcaagaactggctaggaggtgtgacaccctcattcgactggtagaaaaggaaaaccaagaatatgatgagagggagagacaagctcgcaaagagaagaaacttgccaaaagcatgaccccatcgaagcgtgctttggcaagacagacagagagtccatcttctttgaagaagcgcaagcagttaaccatggacgattatgcaagcacggggaagagaagaaaataatgaacatatgctctatattgcgtaggataagtaaggggttgttgggttttaaagtccttggtgatttggatgtggcccagacttggcaattgatggccaggcttgccttccaaaagccgtgctagtttgctaacaacctctaacttgtgtaggctccaaatatctgttgtatggctagttagagaatatcaagtagaaatgggttgttgtattgtaagtatgtatatctacaaaacaaatccttagatttgaacgactagttcaatgaaatatatgtagttctaacttaatgctattttgaagtagacatgcattaagctaacgtttggaaattccggttggcccttaattcgcaagtgaaagnnnnnntg

SEQ ID NO: 8056 - DNA, 2119 bp, Glycine max
gcgggttgcttcgcctcgccgaattttctttctctaaacttctctctctctctctccctacaaattcatttttctcgtttcttttccgagaaagttcattcgcattgcccatctgtgcttgcgtatctgttgatcccgctctgattctatccaattctcacacgcgtttatcccttgttctccaaatatgggctcagtttgaagttgatgtggtcaaagtcaaaatggattcacatgtaatatgataaagacatcacctagccaactgggttttctgaaggttgcaacatgttgatggacctttccctttttgtagatcacttctacaatgaaaagtggattattgatgatactaaatgcttcatgctacattttaactctaaccctcgtctgcaaactaagtgccaacaatttgttgacagttagccacctcttcatggaatctgttccagtctctctgaagtgttattggttatagtgttgtaattctgcgagaagacgacagaaggggaaagatataaaattttgagagagcttggggatggttcttgcggtcatgtgtataaagcccgtgatatgagaacatatgagattgtcgcggtcaaaaggttgaaaagaaagttttgtttctgggaagaatacacaaatttaagagaagttatggtcctccgtaaaatgaatcacccaaatatcataaagttgaaagaggttgttagagaaaataatgaactatttttcatttttgaatacatggattgtaatctttatcaattaataaaggagagagaaaagcccttttcagaggaagagatacggtgctttatgaggcaagtgctacaaggacttagtcacatgcacaagaaaggattctttcatcgggatttaaaacctgagaatatgctggtaacaaatgatgttttgaaaattgctgattttggactggctagagaagtatcatcgatgcctccatatactcaatatgtttccacacggtggtatcgagctccagaagttttgttgcgagccccttgttatactcctgctgttgacatgtgggcagttggtgccatattagctgagctttttactttgacccctatatttcctggtgaaagtgaaatagatcaactgtacaaaatatacggcattcttggtatgccagattccactgctttcaccataggggaaaacaactctcagttattggacgtagttgctcatgaagttgttccacctgtgaagctttctaatattattgcgaatgctagtttggaagctatagacttgatcacacaactgttacattgggacccatcaagaaggccagatgcagatcagtcattgcaacatccatttttccatgtggatgcatgggttccttgtccgcccagtgatccacttgagctgaagctgagtagcaagagggcaaagccaaatcttgagctgaaactgcaggattttggccctgatcccgatgattgttttcttggcttgactttaggtgtaaagcctagtgtttcaaactcagatgtggtccaaaatgtatctcagggtgtcagagagaatgtgctattttgctcagatttcaatgatcattcagaccagtcagtattttggacattattatctcctgatcaaaatggaattcataactcagcagagacttcgttgtcattgtcattcagtccagttcaacatccgccaattggagttccacagtctgtgggattttcttttcagcctttgcagcctaacatcttaacctcaccatttttggctctctcttctcccttccagcgcggccactgcctttgaatcactctactttgaactgcagcactatgatattattgaatcttcataatgcatataacacttttatatttattttaattaatattttgtacagttctctctattatcatgaaatataatgtaattaccgagcaaattttataaggatacttggttccattccttaactgtaacattgagattcaaacctggtatttccagaactcaaatagagaacaagaaaaccggatagatgtcaagggccttgttttggttaccatttgaaggaaaaaaaaagcggttctttttctaaaaaaaaaaaaaa

SEQ ID NO: 8057 - DNA, 1263 bp, Glycine max
gagtcagctacgtaggcccccccccagttcaggattgtttgagtaaatcctgataaatctttggcatacttgcccttcctttctttctttacttcgactatttgttgaagttcatattattttaaatgtaaaagctattttaatgcataaacaacttcagcagaaaagatccatgctacattgtaaacaattggtttcaagcagatttaaataagttggcagcacgtatctttcatttcatgggttgtttacacattttttgtgagcactaaagaggatgaaatactcaaggaaattggaaacttgcattaatttctgtattacattgttgtgaaagtgcattcaaagtctgcgcaatggcacggtccaattaactagcttctaccaacttcttagccacccttagtccaaacattgtgtaaatttaagggtttttgatgtcaaggatacaacttaaagtaatttttttcattaaataaaaaacatattatgttaaaaatataaaagctagtatttctctttttaatttacgatttttttgtttctatattcctattatcagccttaaaatctaataagatatgtgtagttactactattgatcttgattaatagtttgtctctttataatacttcaagttattgatgttgaactctcaatcacaatcaagcttagaacatgggcataattgacatttttatgcaagactctattacatctttaaaatattaatttattattcactgataatttactatttagtcatagccttgcgacttgaaacttatggtaaagtattgataacgtatattttgtgtttgcaggatacgagtttcatatccatttcaatggggagcacctacatttgatgcaggtgaagcctttgttatgatgatgacatcctttgttgctcttgtagaggttctctgaaaggcaagagtatgtgacagtgttactatgtagcactagtgggtgtgacaaatctacaatgtctgcattgcttgtaattttgcttgtaacttgacaaagaaaaataattgtttgtttttcaaatgccaaaaatctagtttttacttattttgtggtaggatatatatgtaagttgaaaatgagtagtatttataccatacagtttgataactatcatttaaatttgtttctagattaatattatgagattgtaagtaatgtgatattgtaatgaaaataatattttaaaatcttttagtttaaaattaatatattttttataaattggttct

SEQ ID NO: 8058 - DNA, 1796 bp, Glycine max
  misc_feature (1791)..(1791): n is a, c, g, or t
gcgtccgcggacgcgtgcccttcgattaaaataaaataaaataaaataaaaaactgaacagaaaaaaagatcagcagcaacttcattccattcccaattcccactcaaccaccaaaccctattcagcatttcccccaaatcaccgtcacaccatgggctcctccgcgatggtgttggacccgaaaccctcatcggagcctccgccgttcctcccgtcgacgaaatcggactaccttcaaggcagcttcggcggcgacgccaccgcctccgacgaggacgacctctacagccgcctgaaatccctccagcgccagctggagttcatcgacatccaggaggagtacgtgaaggatgagcagaagaatctcaagcgcgagctgctccgagcgcaggaggaggtgaagcggatacagtcggtgccgctcgtcattggccagttcatggagatggttgaccagaacaacggcatcgtcggatccaccaccggatccaactactacgtcaggatcctcagtaccatcaaccgcgagcttctcaagccctccgcctccgtcgcactccaccgccactccaacgcgctcgtcgacgttcttccgccggaggccgactccagcatctcgctcctcagccagtccgagaagcctgacgtcacttataatgacattggaggatgtgatatacagaaacaggaaatccgtgaggctgtggagctaccccttacacatcatgaactatacaaacaaattggtattgatcctccccgtggtgttttactgtatggaccccctggcactggcaaaacaatgcttgccaaagctgttgcgaatcataccactgctgctttcatcagggttgtgggatctgagtttgtgcagaagtatcttggtgagggtccacgaatggtccgtgatgtatttcgtcttgctaaagagaatgcccctgcaattatatttattgatgaggttgatgcaatagccactgctagatttgatgcccaaactggagctgatagagaagtacagcgtatccttatggaacttttgaatcagatggatggttttgaccaaacggtaaatgttaaagttataatggcaactaacagagcagacaccttggaccctgctctgttgcgtcctggaaggcttgatcgtaaaattgagttccctttgcctgatagacgccaaaagaggctcgtatttcaggtttgcacagccaaaatgaacttgagtgatgaggtagacctagaggattatgtttctcgtcctgacaaaatcagtgctgctgagatagcagccatttgtcaagaagctggaatgcatgctgttcgcaagaatagatatgtcatactgccgaaggacttcgagaagggttacaggacaaacgtgaagaagcctgatactgactttgaattttacaagtgatgatgttgtagctttgagattggtgtgtgtactcgcgaagttaaatatacagtgaagggggtacatttctagaggaatcacgatcatgagaaatgatgcaatgtttctgtttcttgttgacctttcatcttattttgtaatttagattatttaatttactaaatatattaattgtggaagcttaatgttgagttcgtactgcatgtctgattttcaaaactaatatgggtgacttgcttccgtcttcagtttgccttgatgctcatctgattgcctgagcgcaaatggttctgataaaagcgagatggcttagatgtttttagtctataaaatgagtatgctttgtttttggtccttaaaaaaaaaaaangggcg

SEQ ID NO: 8059 - DNA, 1884 bp, Glycine max
cgattggggaccgggccccccctcgagtcagcttcctaggccccccccccccccattattattattatctacatatttttgcaaagctgcttcatctgtattattacgcagatcagattcaggtccttatcaccaagatccaacaacttctcaaccacaacgagttgctatttccttcgattcacgaacccagaaaattaaagaattaaaaaagatatcgagtatcaaaaacggcatctggaaaacatgtctcaataccatggtgatgaaatggagtatgcggcagacgataatgaaatggcagaggtagaagaggatatgtatttccgtggcagagcatttggtgaatcagattcagatgatgacgacgactacgaatatgaccctttggaaaaccgaatatcagataccactgctgctgaagctaggagggggaaggatatccaaggtataccttgggataggttgagcattagtcgtgagaaatatagacaaactagactagaccagtacaagaattatgaaaacataccacaatcaggggaaatgtcagagaaggaatgcaaagcaacagataaaggggggaaatattatgatttctggcaaaacactagatctgtgaagtcaacaatacttcatttccaattgaggaatttggtttggtcaacatcaaaacatgatgtatatcttgtttcaaattactccattgttcactggtcttcattaacttccaagagatctgaagtcttgaatgtatcagggcatgtagctccatgtgagaaacatcctggaagcctcttggaaggttttactcagacacaaattagtacactggctgtacgagataacttgttgattgctggagggtttcaaggagaacttatttgcaagtacttagacaggccaggggttagtttttgtacccgaactacgtatgaggacaatgcaatcacaaatgctgtggagatttatgagcacccaagtggagctgttcatttcatggcttcaaacaatgactctggagttagagactttgatatggagagatttcagctttcgaagcatttctgctttccttggccagtaaatcatacttcattgagccctgatgggaaactagttgttattgttggagactacccagaagggttactggtggattctcaaacaggaaagactatcacaccttttcgtggacacttggatttctcatttgcatctgcatggcatcctgatggccacatatttgctactgggaaccaagacaaaacatgtcgtgtttgggatgttcggaacttgtcaaaatccgttgctgttcttaaaggcaatcttggagctatacgctcaatacgtttcacatctgatggacagttcatggcgatggccgagccagctgactttgtgcatgtgtatgacgcaaagcatggatttgagaaggagcaagagattgatttttttggggagatctctggtgtatcctttagccctgatacagaatcactctttattggtgtttgggaccgcacctatggaagccttctacagctcaatcgacgcagaaattacatgtatcttgactgcttgtaaatttgtaaccttacaccttgtaagtaccaacagcttatgttgtgttgtctagtgtttaggaattgtaccatcatagaaaaaccggtggattgcctcatcatacattgtagagcatggcttgaggatgctacagttgtttgatgtacaccttcatgctaaataacattgactgccaatgtctgttttaatctttccgaaggtaataatgtgaaggatgtttgtacagaggtctataatgcaatgctttaccctcatcttttactgccaaaaactcgagactagttctctctctctctc

SEQ ID NO: 8060 - DNA, 1642 bp, Glycine max
cacgcgtcccgccccagatcagatcctctctcttcaattcaacttcaagccaagccaagattttccatttctcgataactccattgtcgcaacatggctcaacaacaggaggacgaaatggagtatgttgctgatgataatgaaatggcggaagtagaagatgacatgtatttccgtggtagagtgtttggtgattcagagtccgaatcagatgacgatgatgaatatgactccatggaaaatcggatgacagatacctctgctgcagaagccaggaaaggaaaggatatccaaggtattccttgggatagacttagcattagtcgtgagaagtatagacaaactagactagagcagtacaagaactatgaaaatataccgcaatcaggcgaacagtcagaaaaggaatgcacaccaacacatagaggaggaaagtattatgatttctggcaaaacactcgatctgtgaaatcaacaatacttcatttccaattgaggaacttggtttgggcaacatcaaagcatgatgcatatcttgtttcgagttactcaattatacactggtcgtctttaaattccaagagatcagaaatcctgaatgtatcagggcatgtagctccatgtgagaaacatcctggaagccttttggaaggatttactcagacacagattagtacactggctgtgcgggataagttgttgattgctggggggtttcaaggagaacttatttgcaagtacgtagatcgacctggtgttagcttttgttctagaactacttatgatgacaatgcaataacaaatgctgttgagatttatgatcatccaagtggagctgttcatttcatggcttcaaataatgactgtggagttagagactttgacatggaaagatttcagctttccaagcatttctccttctcctggcccgtaaatcatacttcattgagcccagatgggaaactggttgtgattgttggagacaacccagaagggatactagtggattctcaaactggaaagactgtcaagcctttatgtggacacttggattactcatttgcgtctgcatggcatcctgatggccgcatttttgctactgggaaccaagacaaaacatgccgtgtttgggatgttaggaacttgtcaaagtctgtcactgtgcttaagggcaaccttggagctatacgttctatacggtttacatctgatggtcggttcatggcaatggccgagccagctgactttgtgcatgtatatgatgcacagagtgggtttgagaaggagcaggagatcgatttttttggggagatctctggtgtatcttttagccctgacacagaatcactttttgttggtgtctgggatcgcacctatggaagccttcttcagtacaatcgacggagaaactatatgtatcttgactgcatgtaaattgtaactgcattccttgtgtttgtaaagtgcctacagtttatgttcttctgtctaggaatttgagaattgtggcaccacctgactgagaagaaaaatgaccggtggcatgcttcattatacaatgtaggatgatatggtcgttacataaacttcgttgtgttaaataacattgattgccaatttctggaaccttttttttattatt

SEQ ID NO: 8061 - DNA, 3122 bp, Glycine max
cactatctatacacaaacaacatggttcgctacattgaaggctatgttcagaaggtgaaccgagggaatgcacctttagttgttgggcagctgctagatgatgaatgcgcagaagattttatcaaaggctcgatcctttctgttcgttcattactgccagtggagccccttgtggagggaatgtgagaagagggaatcgacttcgtatgctcacacagttctttggaacaccttgtaagtgaggggaagccgggatgtacatgttcacaatgcactgggccgaattatcattgatagcaacaacaacccagaacatttcctcacaaccaacccatactatgattctcgaggtgtgggcaagttttgtgagaaacggggatcccaccttagcagttgtagcttatcggcgaggaccatgtgacgatgaacttatcaatgtcaccaacaaaaattctttgttcaaactgcaagcaagatatgttgttgagagaatggatggtgatttgtgggctaaagttcttgatcctgataatgaatatagaaggcaacttattgatcaggttgtatctactgctttgcctgaaagctcaagccctgagcaagtttctgcagctgttaaggctttcatgacagccgatctgccccatgaattgattgaacttcttgagaagattgtgcttcagaattctgcattcagtggaaactttaatttgcagaatcttcttattttgacagcaataaaggctgatccatccagagttatggattatgttaatagattggataattttgatgggcccgcagttggaggaatggctgtagaagctcagttatatgaggaagcatttgccatttttaagaagttcaacttgaatgttcaagcagtcaacgtgttgcttgataagattcatagcattgatagagctgttgagtttgctttccgagttgaagaagatgctgtttggagtcaggtggccaaggctcaactcagggatgggctagtaagtgatgcaattgagtcatttatacgagctgatgatgctacacaatttttagatgttatccgtgctgctgaagatggcaatgtttaccatgacttggtgaaatacttgctaatggtaagagggaaagcaaaagaacccaaggtcgacagtgagctcatttatgcatatgcaaaaatagataggctgagtgacattgaggagttcattcttatgcctaatgttgctaatcttcaaaatgttggtgaccggttgtacgatgaagcattatatgaagctgcaaaaatcatatttgcttttatatctaactgggccaagttggctatcacactggtcaaattacaacagtttcaaggtgctgttgatgcagcaaggaaagccaacagctcaaagacatggaaggaagtttgctttgcttgtgttgatgcagaggagtttcgtttggcccaaatttgtggactaaacattattattcaggtggatgacttggaagaagtcagtgaatattaccaaaacagaggttgcttcaatgagctcatatctctcatggagagtggtttagggttagaacgggcacatatgggcatctttactgagttaggagttctgtacgctagataccgccctgagaagcttatggagcatatcaaactattctcaacccgcctcaatattcctaaactcataagagcttgtgatgaacaacagcattggaaagaattgacctatttgtatatacaatatggtgagtttgataatgctgcaactaccatcatgaaccattcacctgaagcatgggatcacatgcaattcaaagatgttgttgttaaagttgccaatgtggagttgtactacaaggctgttcacttctacttggaagagcatccagatcttatcaatgatgttctgaacgtccttgcacttcgtgtggaccatgcacgtgttgttgacatcatgcggaaggctggtcacctccgtcttgtgaaaccgtatatgattgcagttcaaagcaacaatgtatctgctgttaatgaagcgttgaatgagatatatgtcgaggaggaagattatgatagattgcgcgagtcaattgatttgcacgataactttgatcaaataggccttgctcaaaagattgaaaagcatgagcttcttgagatgagacgtgttgctgcttatatttacaagaaggcaggtaggtggaagcagtctattgctttgtcaaagaaggataacctttacaaagatgccatggagacagcctcccaatccggggagcgtgaacttgctgaggagttgcttgtttatttcattgatcagggaaagaaggaatgctttgcctcatgtctatttgtttgctatgatctcatacgggcagacattgttcttgaactagcttggatgcacaatatgattgactttgccttcccatatctattgcagtttattcgtgagtacactggcaaagtcgatgaactagtgaaggacaaaattgaagcacaaaatgaagtgaaggctaaagagcaagaagaaaaggatgtagttgcacaacagaacatgtatgctcaattgttgcctcttgctttgcctgcaccaccaatgcctggaatgggaggctttgctcctccccctccaatgggtggactggggatgcccccaatgcctccttatggtatgccacccatgggcagcagtttttgaagagtatagcatgaactcggtccctatgaagagcaatgtaggaacttccaagttttgcgtagaacaatatcttgtgtgatttggatgcagcattctttctttgcttcggttggcggtgggatatcccaagttaaaataatgtgaagtttttcggtttagattgtgtcataatagtcttgtaagtttattgttttttctgtgttgtagtcgaggcattttttgggctgctgattctagctaaccgataaatttctgtattctaccatttttcttgtaataaatgagttagtcctaggtagaccaaacaaaaaatgaattacatctagtatatataagaaattttccgactttaacagccaaaaaaaaaaaaaaaccaaaaaaaaaaaaggacagaaaaaaaaaaaaaaaaaaaaaggaaaa

SEQ ID NO: 8062 - DNA, 893 bp, Glycine max
tgcatactattgactaaggtcaaatatattctaatgtttctttccacatgtttatgcagggaaagaaagaatgctttgcctcgtgtctatttgtttgctatgatttgatccgggcagacattgctcttgagttggcctggatgaacaatatgattgactttgccttcccatatctcctgcagtttatccgtgagtacaccggcaaagttgatgaactggtgaaggataaaattgaagcgcagaaccaagtgaaggctaaagaacaagaagagaaggaagtaattgctcaacagaatatgtatgctcagttgttgcctcttgctttgcccgcaccaccaatgcctggaatgggaggaggctttgcgcctccccctccaatgggtggattggggatgcctccaatgcctccttttggaatgccacccatgggcagctactgacatataagttctcggcaatgaactcaagtgtataccgagagcagcgtagcaacttgggagttttcaaacattttcttctggggttttaatgcagtattctttccttgcttctaatggaggaggaggttcagttcaaaataatttcaagtttctgttggggggtttgtgccatatttttgtaatatttttctttatagttgaggcatttttttgggctgcttgcacgagctagccgaggattttctgtatgtaaccaattttcttgtattaaaatgatgggtccaaagtattataatacgaaatagaacccactttgactcctagcccatgtttgtcatggcctagatttattccactttaccttgtgatggaaactacctgatttaaggcttgttggcatgttttgtttgttatgtgcatcttctaaatacgtggtttattgccaaaaaaaaa

SEQ ID NO: 8063 - DNA, 5537 bp, Glycine max
cccagatttcccctcgacttgggcaccccccatcgccgaactccatcctccgactcaagcaccgcctcagagatttctcgcccattgaaccaaaccatcatggcggccgccaatgctccgatcgccatgagagaaactctcacctttccgaccattggcatcaatccgcaattcatcacgttcacgcatgtgacgatggagtccgataagtatatatccgttcgagaaacggctccacaggatagtgtggttatcattgatatgaacatgccgaatcaacctttgaggaggcctatcacggcagattctgctcttatgaatccgaattctagaagccttgctttgaaaacccaactccaaggaacaactcaagatcacctacaaatttttaacattgaatttaaatcaaagatgaaatcttatcagatacctgaacaggtgtctttttggaagtggattacccccaagttgttgggtattgtaacacagacctctgtataccattggtcaattgaaggtgactctgaacctgtaaagatgtttgagagaacagcgaatctgccaaacaaccaaataattaattatagatgtgatcctacagagaaatggttggtcttgattggtattctccatggttcccctgagaggccacaattggtaaaaggaagaatgcaactcttctctgtggaacaacaacggagccaggctcttgaagcacatgctgcatcatttgctcaattcaaagttcctgggaatgaaaacccatctactttgtttctttttgccacgaaccctaatgctggtcaaattataaccaagttgcatgttattgagctgggtgcacaaccagggaaccatcatttaccaagaaacaagcagatcttttcttccccccagattttttctgatgattttccagttgccatgcagatatcccacaaatacaatttgatttatgtgattaccaaacttggtctcctatttgtctacgatttggagacagctacagctgtatataggaacagaattagtccagatcctatatttttgacatcagaagctacatctgttggaggcttttatgccattaataggagaggccaggtgttgttggctactgttaatgagcaaacgatcgtgaattttgtcagtggtcagttaaacaatttggagctagcagttaatcttgccaagcgaggaaatcttcctggtgctgagaaactggtggtagaacgtttccatgaactgtttgcccaaacaaagtataaagaagcagctgaacttgctgctgagtctccgcaaggaatccttcgcacacctgatacagttgccaaatttcagagtgttcctgtgcaagctgggcaaactcctccactattgcagtattttggaacacttctaacaagaggaaagctgaatgcccttgagtcattggaattgtcaaggctggttgtgaaccagaacaagaaaaatcttttggagaattggttggcggaggataagcttgaatgcagtgaggagctaggagatctcgttaagactgtggacaatgatcttgctttaaaaatatacatcaaagccagagctactccaaaagttgttgctgcgtttgctgagaggagggagtttgacaagattctgatttactctaaacaggttgggtacacacctgactacctcttccttctgcaaacaattctccggacagatcctcagggcgctgttaattttgcattaatgatgtctcaaatggagggaggtagcccagttgattacaacacaataactgatctctttcttcagagaaatctgattcgagaggcaacagcttttctcctggatgttctgaaaccgaatctaccagaacatgggttccttcagacaaaggtgttggagataaatctggtgactttccccaatgttgctgatgcaattttggctaatggcatgttcagccattatgaccgtcctcgtattgcccaactttgtgaaaaagctggtctttatgtgcgagctttgcaacattacacagagttgccagatataaaacgtgtgattgtaaatacacatgcaattgagccacagtcactcgttgaattttttggtactctgtcaagagaatgggcattagagtgtatgaaagacctattgctggtcaatcttagaggcaacctacagattattgtgcaggttgctaaagaatattgtgaacaattgggcgttgatgcttgcataaagctttttgagcagttcaggtcatatgaagggctgtattttttcctgggatcatatttgagctccagtgaggatcctgacattcacttcaagtacattgaggcagcagcaaagactggacaaatcaaagaggttgagcgtgtgactagagaatcaagtttttatgatcctgagaaaacaaagaactttctaatggaagctaagcttccagatgcacgacctctgattaatgtttgtgaccgatttggatttgttccggatctaacacactatctatacacaaacaacatgcttcgttacattgaaggttatgttcagaaggtgaacccagggaatgctcctttagtcgttgggcagcttttagatgatgaatgtccagaagattttatcaaaggcttgattctctctgttcgctccttactgccagtggagccccttgtggaggagtgtgagaagaggaatcggcttcgtttgcttacacagtttttggaacatcttgtaagtgagggaagccaggatgtacatgttcacaatgcactgggtaaaatcatcattgatagcaacaacaatccggaacattttctcactaccaacccatactatgattctcgggttgtgggaaaatattgtgagaaacgtgatcccaccttggcagttgtagcttataggcggggactatgtgatgacgagcttatcaatgtgacaaacaaaaattctttgttcaaactgcaagcaagatatgttgttgagaggatggatggtgatctttgggagaaagttcttaaccctgataatgcctacagaaggcaacttattgatcaggttgtatctacagctcttcctgaaagcaagagccctgaacaagtatctgcagctgttaaggctttcatgactgctgatctacctcacgaattgattgagcttcttgagaagattgtgcttcagaattctgcattcagtgggaactttaatcttcagaatctgcttattttaacagcaataaaggctgatccgtccagagttatggattatattaatagactggataattttgatgggcctgcagttggagaaatggctgttgaggctcagttatatgaggaagcatttgcaattttcaagaagttcaacttaaatgtccaagcagtcaatgtcttgctagatcatattcatagcattgatagagctgtggagtttgctttccgagttgaagaagatgctgtttggagtcaggtggccaaggctcaactaagggaagggctagtaagtgatgccattgagtcctttatacgagctgacgatgccacacagtttttggatgttatccgtgctgctgaagatggaaatgcttaccatgacttggtgagatacttgttgatggtaaggcataagacaaaagaacccaaggtggacagtgagctcatttacgcgtatgcaaagattgatcggctcagtgacattgaggagttcattcttatgccaaatgtagccaatcttcaaaatgttggtgaccgattatatgatgaagaactatatgaggctgctaaaatcatatttgcttttatatctaactgggccaagttagcagttacacttgtgaagttgaaacaattccaaggtgcagttgatgcagcaaggaaagctaacagtgcaaaaacatggaaggaagtttgctttgcatgtgttgacgcggaggagtttcgtttggcccagatatgtgggcttaatattattattcaggtggatgacttggaagaggtcagtgaatattaccaaaatagaggttgcttcaatgagctaatatcgcttatggagagtggtttaggattagaacgggcacatatgggtatctttacagagttaggagttctgtatgctagatatcgtcatgagaagcttatggagcatatcaaactatttgcgactcgacccaatattccaaaactcataagagcttgtgatgaacaacaacattggaaggagctgacctatttgtacatccaatatgatgagttcgataatgctgcaacaaccatcatgaaccattcacctgaagcatgggatcacatgcaactcaaagatgttgttgtcaaagttgctaatgtagagttgtattacaaggctgttcacttctatttacaagagcatccagatcttatcaatgatgttttgaatgtccttgcacttcgtgttgatcaggcacgtgttgttgacatcatgcgaaaggctggtcatctccggcttgtcaagccttacatggttgcagttcagagtaacaacgtgtctgctgttaatgaagccctgaatgaaatatatgttgaggaggaagactatgatagattgcgcgagtcaattgatttgcatgataactttgaccaaataggccttgcacagaagattgaaacgcatgagcttcttgagatgagacgtgtcgctgcttatatttacaagaaggcaggtagatggaaacagtccatagagctatgtcacaagaaagataccctatacaaagatgccatggagacagtctcacaatctggtgaccgtgaacttgttgaggagttgcttgtttatttcattgatcagggaaagaaagaatgctttgcctcgtgtctatttgtttgctatgatttgatccgggcagacattgctcttgaattggcctggatgaacaatatgattgactttgccttcccatatctcctgcagtttatccgtgagtacactggcaaagttgatgaactggtgaaggataaaattgaagcgcagaaccaagtgaaggctaaagagcaagaagagaaggaagtaattgctcaacagaatatgtatgctcagttgttgcctcttgctttgcccgcaccgccaatgcctggaatgggaggaggctttgcccctccccctccaatgggtggattggggatgcctccaatgcctccttttggaatgccacccatgggcagctactgacatataagttcggcaatgaactcaagtgtataccgagagcagcgtagcaacttgggagttttcaaacattttcttttggtgttttaatgcagtattctttccttgcttctaatggaagaggaggttcaggtcaaaataatttcaaatttctgttggggggtttgtgtcatattttggtaatatttttctatagttgaggcatattttggggctgtttgaacgagctagccgaggattttctgtatgtaaccacatttcttgttttaaatgatggtccaaaagaattattatacgaaatagaacccactttgactcaaaaaaaaaaaaaaaaaaaa

SEQ ID NO: 8064 - DNA, 1882 bp, Glycine max
cctacccaaagttcagcaacacccgcaacaagtcaaggaggtcaaactgggaccagcagttctatgggaagcgcccagttgcaaacctgggtgcaaggggctattgccaaaattagcaacacaactgatggcgggtccaatccaactcctaatcccatcagtggcccttcaacatttatgcctattagcattaatacaggaacatttcctggaacaccagcagttagacttattggggattgtcatttccttcacagacttcgcctacgttggccccccccccctttctttcgacggacacaacttcctcgctatattaatagaacatctgatacaaatatacaaaagcctcaatctaatactcctgctcctggcaaggtggaggagattgcaaaaccagtttcagctgtggttaagtcagatgatggtcagacaggtcgaactggggcaaaaggagctgaagaagtaccctctggacgttcaagattgggtagtgggaatgctggccagggatatacgtttgaagaggtcaaggtgctttttatgatgcttatggatctatgtcgccgaacagctgggctgcaacaccctttgccagtttctcaagtggggagcaacaacattcaggttcggctgcattatattgatgggaactatagtgtacagccagaggttgtggaagcatcccttggtccacatatgcagaatatgccccgtcccagaggtgcagatgctgctggtcttcttttacgcgaactagaactccaccctccagcagaagagtggcacaggcggaatatgtttggtgcaccttggtctgatccagaggatgtggattgtgctaatgatacacctaaacttgttaattctgacccacttgattttagctcattggagcattgtgatgtttactatggaactcatcgcttatggccaaggaagcgcaggatgtctgaaagagatgcagcttttgggttgaatacttctgtgggcttgggaggttatcttggtataatgggttctcgaagagatgttgttactgcaacgtggaaaactggccttgaaggggtctggtacaagtgcgtaagatgtcagcggcagacttcagcatttacttcaccagatgctactgcttctcctagtcagaatgaccgggaaatgtggtggatcagccgttgggtacatagctgcccaatgtgtggtggaacatgggctcgggttgtataaataggtgcattatgttattataatgtcagtttcactctatggaaagagagacatggatatagttatggctaactgtgaactgaatcagatggaatgctgactggagttgtacaggaagaaaggtgtggatttgcttgacaagtttcagatctcaatttttttgggagtaaattattgtcaagtcactccacaaacagtaggtgttaatttatccatggagtggtttataattaactccttgcagattgtcaatcctctgtaaaaacactactgtatcctgcatgccgtttcatgcatgctgatgtgggtgggtgccttggaagttgctgctggtgaatcagagattaggagcttatattagttatcactcattaatccctgagaaatctctgcataaacttcttagactttcttcacttgttggttgtattatgtaaatgatgctcaccatattgttagattagcttagcatcttattatcttctcatgatacctgtaaaattgatgaaaatttttgttttatttcattggggtacatcaaaaaaagatataattcaatgtactggacctacataaagcctggatttttgtatttgtcctcactgcttaggggtctccttaacattatgcagtttttagtaaatagtttagacgc

SEQ ID NO: 8065 - DNA, 1369 bp, Glycine max
tacggctgcgaggaccctcccttcccaagttccaagtcgcaaacaaagtaacactagaactcacaaaggacagaagaaacgcgaatgccaggagaactccaattaccacccgggttcagattccaccccactgacgatgagcttgtgaatcactacttgtgtagaaagtgtgctgcacaaaccattgctgttcccatcatcaaagaaatcgatttgtacaagtttgatccatggcagcttccagagatggctctttacggtgagaaagagtggtactttttctctcctcgagaccgaaaatacccaaacggttcgagaccgaaccgggctgccggaagcgggtactggaaggctaccggagctgacaaaccgatcggaaaaccgaaagcccttggaatcaagaaggccctcgtgttctacgcgggcaaagccccaaagggagtgaagaccaattggatcatgcacgaatatcgcttagccaacgtcgacagatccgcctcaaaaaaaaacaccaccaccaacaacttgaggcttgatgattgggttttgtgccgaatttacaacaagaaagggaagattgagaagtacaatggtgttgcggtggtggatcagaaagtggccaagttatcagaagaggaggttcagttccagcacgagaccaagcctcagatcaagatgtacggccacgatgatttcaggaacgaccaattgtacatggacacgtcggattcggggcccaggttgcacacggactccagctgctccgagcacgtggtttcgcccgatggcacgtgcgagaaggaggtgcagagcgagcccaagtggaatgatcttgagttgggccccgacccagccttgggcttcgattttaatttcatggacctgacctcagatgacgcttttgcccctcaggttcaataccaaatcaaccatctctcaccgtggcaagaaatgttcacgtacctaccaaagacattttgatttttttagggtcaatgggaccccaagaaggaaatacgggtctcacatttatttttttaaaattcgttaaaaaaaaaaacaactaaaaaatcccattccagcgtacctactaaactactgtacctaactactactcatgccggctttggtctgcacgtgtggtgactatcatctgatcttgggattgttgaaattgactgccatggatcactaggaaaaaattagatcatagggacctaaaaataaaaaaaaatgatctccaactggtgtgaaagaataaagatccattagctatgttaggaattgtgtcgacatgtaaggactaaggacccctagtagaaaattcttgtttcattgctctaaaacacaaaaaaaaaaaaaacgaacc

SEQ ID NO: 8066 - DNA, 1092 bp, Glycine max
caaagtaacactagaactcacaaaggacagaagaaacgcgaatgccaggagaactccaattaccacccgggttcagattccaccccactgacgatgagcttgtgaatcactacttgtgtagaaagtgtgctgcacaaaccattgctgttcccatcatcaaagaaatcgatttgtacaagtttgatccatggcagcttccagagatggctctttacggtgagaaagagtggtactttttctctcctcgagaccgaaaatacccaaacggttcgagaccgaaccgggctgccggaagcgggtactggaaggctaccggagctgacaaaccgatcggaaaaccgaaactactacagcagcgtcagaggcccttcttgaagctgggagtcaagactcgcggctgcaacggcttatcctacaccctcaattacgcagatgaaaaagggaagtttgatgagttggttgaggataagggtgttatgatactgattgatccaaaggcccttatgcatgtcattggaactaaaatggattttgtagatgacaaactaagatcggaatttattttcgtcaatccaaattccaaaggtcagtgtggttgtggtgaatctttcatgacaacaggcagtagtggatcttctaagccatgaaatagttaaaattgctatccaagccgtggatcctcacgtaatgaagtcgtcctttcatgatttaattgatagatagacatacaagtacaactaatggatttctattattctgcctgcgagaacaagggaaacgaaaactttggtgctcagaacaaaaggatactgaggactgacatggtctcgatatacagagttctctgaagctgatggtaataggcttatttcaacaatttttattgtcatttgttttgatgattcttatttctaatataaaattctttgtatcatgagaattgtagtttgtaggtttacaatatcattgaaataattttcgttaagttgaagaaatttctcttaaaattctttggtcaacttgaagattacggtttcactaaattattaccaaaaaaaaaaaaagaaaaacttcgagggggggcccgtaccc

SEQ ID NO: 8067 - DNA, 916 bp, Glycine max
tgattaggccacataagcacctagaccacgcgtccgcttggggaacgttctacgagcagcatagccacaacgtggcggccacgcgccatacctgaaaaggaggaaatgctgtaatatcccaaaacaacgggacagagatagtttatcttcgatggcttccaaggcgatgagcgtggcagcggagaagatagcgacggcggcgcgacgccaagccgtgtcgctaacggacgccgccgcctcgcgaatacggcagctgctacagcagcgtcagaggcccttcttgaagctgggagtcaaggctcgcggctgcaacggcttatcctacaccctcaattacgcagatgaaaaagggaagtttgatgagttggttgaggataagggtgttaagatattgattgatccaaaggcccttatgcatgtcattggaactaaaatggattttgtagatgacaaactaagatcggaatttattttcgtcaatccaaattctaaaggtcagtgtggttgtggtgaatctttcatgacaacaggcagtagtggatcttctaagccatgaaatagttaaaattgctattcaacttgctgtggatcctcacgtaatgaagtcgtcctttcacgatttaattgatagatagacatacaagtacaactaatggatttctattattctgcctgcgagaacaagggaaatgagagctttggtgctcagaacaaaaggatactgaggactgacatggtctcaatatacagagttctctgaagctgatggtaataaggcttatttcaacaatttgtattatcatttgttttgatgattcttatttctaatataaaattatttgtatcatgagaattgtagtttgtaggtttacaatatcattgaaataattttcgttaagttgaagaaatttctctt

SEQ ID NO: 8068 - DNA, 1863 bp, Glycine max
tcgagtcagctacgtaggtcccccccccgaacaaagaaatcttcaatttgaattccaatggcgtgaagagcgatccgagatagtgttcttcgatgtggagaccagcgttccgacccgggcggggcagggttttgcgcttctggaattcggcgccattttggtttgccccaggacgctcaccgagctccgcgattactccactctcgtccgcccagccaacctctccgtcatcacccccttgtccgagcgctgcaacggcatcaacgccgccgctgtctccgccgcccctaccttcgccgacattgctcacctcgtttacgacctcctccacggtttctttcttcacctctctctctctctctctctctactgaaattaatcaattgttctgaattttgactgtttagggaggatttgggcggggcataacatcataagattcgactgtgttcggattagagatgcgtttgctgagattaatcagccaccgcctgaacctaaggggaccattgactcgctggttttgttgactcacaagtttggtagaagagctggtgacatgaagatggctactcttgctacttattttgggcttggacgccagacacataggcgcctgcgtgggccccccccccctgaacttgtcataaaatgttgattatatctgtttttacaggagtcaagtctcccagatatattcactgcaaatagttgggtttcaccaaatgctactacaagaagccgcagtaatgggaaatctccatcacagtggggcttattaaatattaataaagattctgtattatcatctcctgcaactgaatccaaagacaaaaatcgtccaataatttcttttgcattgagcagcccaaaagggaatgtctcgaatattgcagatcctaacatggatcaatcagatccttttaacttgagcactcttgaggctgaaataaaaagagaatccattaagtcagatgtcgccttggaggaaaaacccatgcaagagtcaactgatttggcttcctcatcttctgtatctcagccttgcagcagctctattgctgttttggaacctgatggaatatgtataccttctattgatgcatctcttgttccatcttttcgtggcagtcaaagaatagagttactgcatgaaggtttcctgtttcagcttcattgtactgatttgaaagtgcggtttggaataaactcaaagttttttgatagtgctggccggccacgattgagttttgtggttgatccatcaccaagtctatgtaatgttcttgatgcatgtgaccgtgtagcacagaagttaaccgtggattctggtagcagctctgattggaggcctgttgttattaggaaagaaggcttcttcaactatcctactgtcagattacacatacctactgcagtagtggcagacattgctatttatgccacggaaatatatcaaagagaatcatctggaacagtgcaaagacttctcttcagtaagtttgatgctgcagaacttggttccttgttcatgcctgggacatttgttgatgccgtcttctccttagatccgtatgattatcagcagaatgcagggattaaattagttgccaaaaaattgatcattcatagcaaatagaaggaaattgataattaagtataggttagttattacatgctaaggttgatagattaaatattggttatgctgtaaagttagttccatttcatgtttgtagttcaattgatgttcatacctttaaattttctggttactcagtactcactgatttcctcaactccatctagaactacaggatgaatttcctctcctgtggcaaaaatgaataagtaagaattaag

SEQ ID NO: 8069 - DNA, 1202 bp, Glycine max
  misc_feature (1166)..(1166): n is a, c, g, or t
attttttgtgaagctgtatgcttcaatggctatgaatattcgctttgtatgcggtgcactgaaaaggttcactccgcttcactcctccaattgggtttcgaagaagaataagggtttcttctgcaagatgtcgaccgagtcaccttccttgactcacactatcacactgcccaataaacacaacgaacctgttcacattgttgctgctcccggtgtctccaattctgatttctggtgtgctgttgaatcctctttattcaagcagtggttgcataacttgcaaactgagaatgggattctagctgatggtaccatgactctcagacaagttcgaattcagggagtagacatgtttggaaagcgcattgggtttctcaagttcaaagctgacatttttgacaaggaaacagggaaaatgattccaggcattgtatttgcaagaggaccagctgtagctgtgctgatactcctggaatcagagggtgagacttatgctgttcttactgaacaggcaagggttcctgttggaagaaacattttggaattgcctgctggaatgttggatgatgacaaaggtgattttgttggtactgcagtgcgtgaggttgaagaagagactggtctcaagttaaacgtagaagacatggttgacctcactgctttccttgactctacaactggatgcagagttttcccctctgggggaggatgtgatgaagaaatcagtatttttctgtacagagggtgtgttgataaagagataatcacacaactacaaggtaaagagaccggccttcgtgaacatggggagctaattaaggtacgtgtagtaccatacaagaaactttggcgcacaacagcagattgcatggttctggtggctgttgcactgttagaaatggctatgaaagaaggcctattgcctactttgtctacctaatttagtagcctttgtggctggtggtgcaacacccaggaagacaacaattcaagagagaccattagaaatttgattgttcttagtctaactttttattcgtgttgctactctgcctaacaattcaagagaaactattagaaatttgatttttttgacgataactagcaacagaagacttgattgttattgttgtgttttgcactcgttggaactagcccttgccaanagatttagttgcacccttccaaaaaaaaaaaaaaaa

SEQ ID NO: 8070 - DNA, 1794 bp, Glycine max
tcgatcagctacgtaggccccccccccagaacaaaaataaaataaaaaggaaacgtatagaaaaagcttttccaagaattggcaaaaagagaagaagggagagagattcatgttcatattttccccttcgtgcccgtcaagtttctgattctctttttcaattcctttctctttcaggtgattttttctccacgataaagttgcgatttcgccggtgtcgttttgccgcaagatggtgtcgttttcgggaatataaaatcagggttgaagttctttcttcagcattgaatctttggttacataggttggtttctttagaactcgattcaatttcaaataattggtcctccctttttgtggaactcaattctattaggttagtggaaagagaaaaaaaaacatggttgaatcaattgctgcaacttcactccttggccaccgtccaatttgtggtggaaatttaaccagggatgtatctgttaaacgcaaatctttgaatactgttcggttcccaacaactgagtttcttggtggtggaaggattgtggtttctctggctttgcctaaatctgataagcaagataggtttgtgttttcatcaattaaggccttggctgtggagttaacaagagaagcacatgcttatagggaagagaaattgcccaacagggataccaagattgatcgtggatttgatcaaaggcctgattcgtggcctcctgcgaatagggcagataaaccgtcgcttcggaatccactactccgtcatgagaggatgggatgtggttggttgggtgctatatttgagtgggagggtgttctaattgaagacaaccctgatttagagaagcaggcttggctggcactctctcaggaagaaggcaaaccctctcctcctgcttttatcctcaagagaatagagggcatgaagaatgaacaggcgatttcagaagtgctgtgttggtctagggatccggcacagctgagaagaatggctaatagaaaggaagaaatctaccaagctttgctgggtgggatatatagtttcttgtctgggtccaaggagtttgtgagtgttttgatgcattataagataccaatggcattggtttccacgcggcctagaaaggctcttgagtctgctatgggggagattgggattgaggacactttcagtgttattgtagcagcagaggatgttcataggggaaagcctgatccagaaatgtttgtgtatgctgcacagcttttgaacttcatacctgagaggtgcattgtgtttggtaactccaatctaacagtggaggctgcacatgaagcgcggatgaagtgtgtggctgttgctagcaagcatcctgtatatgagcttggggctgcagacttggttgtcaggcgcctagatgagctttcagtggttgatttgaagaatcttgcagacattgaaatgactgaatttgggtctgtggagcctgagatggagctggaggtggaaaaagattatggctcatcatcagttgatgacaatttctggtaaatcctataatgtacagttgattgaacctcatctgattgttgatgatattagttacaggttagttacttgtgtatatggtaatcagaataaatggggggaaaaaatgataagtggtatgcattgaacattgatgttactactaatgcattttctgttcatatacattcacgaatttttagatttgatttactggtgtttccatccataaaatagaatacaaattacctcatgaagtttaggtcaaaaaaaaaaaaaaaaaa

SEQ ID NO: 8071 - DNA, 907 bp, Glycine max
gaactttttgatgctctttaattcaaaattgtggtactcataagtgtctttgtgaaaaaggaggtcccatcatgaattttctgggagaggaaaagtacactaatcctatcagtttcagccaatagattcactctcacggattccttgaaccaaacctgccgctgattgtttatttctctctttccattccaaattaacaaaccgtctcttcttcctcctaacctccttatatataaaaccatctattcccccccttttttccactccctcttcttctcttcttcccccaacaaactaaaccaaaccaaaccataccattaagaaacaacacatctatctcagtccccaaaccaagaaaccctaaattaaattcatgtgctcctccaggtctaccagtgctgcaccaacaagaccttgttacttggaacaaggccacggcttggcttccttaaaacacatggatgcgtgtcataatcgtgccaacaactttgtctctaggtccatgaccatgggttacggcacttcctaccacagaactagtttaaggaacaacaacaacaacaacaacaacaacgtttctgtttcttcaccaagatctgcgagattctacgacgccagattcgaagatcaacaccacccccacttcctctccgcttgtttcctctgcaaaaaatctctcggggacaatagagacatcttcatgtatagaggggacacaccgttttgtagcgaagagtgcaggcaagagcagattgagatagacgaagccaaagagaagaataggaacctttcttcatcgatgaaagctttaaggaacaaggagcagagaaataatgataataaatccacgtggcgcaacaatgcgcagcaagactactcgtgccgtactgtggcgagagcagcggcg

SEQ ID NO: 8072 - DNA, 1122 bp, Glycine max
tctcttcttcccccaacaaactaaaccaaaccaaaccataccattaagaaacaacacatctatctcagtccccaaaccaagaaaccctaaattaaattcatgtgctcctccgggtctaccagtgctgcaccaccccacgcgtccgcccacgcgtccggccacggcttggcttccttaaaacacatggatgcgtgtcataatcgtgccaacaactttgtctctaggtccatgaccatgggttacggcacttcctaccacagaactagtttaaggaacaacaacaacaacaacaacaacaacgtttctgtttcttcaccaagatctgcgagattctacgacgccagattcgaagatcaacaccacccccacttcctctccgcttgtttcctctgcaaaaaatctctcggggacaatagagacatcttcatgtatagaggggacacaccgttttgtagcgaagagtgcaggcaagagcagattgagatagacgaagccaaagagaagaataggaacctttcttcatcgatgaaagctttaaggaacaaggagcagagaaataataataataaatccacgtcgccaaacaaggcgcaacaagactactcgttccgtacgggggcagttgcggcggcgtagggtacaagtacaacgtaggattcctcgagagaggaaccaacaaatgaacgaacggaactgagggcagtgttcccggaaaaggaaagaaaacatttttagaaaagaagaaaaaaaaagtgtgactgaaaaggaaagtaaacaaagggaagttaagttgcgagctttggtttacttctcttcttttttttctttctttctttctttccacgaacaaagggtctcaaagagaaaggggaattttgtgagctgtgaatggtatacgtgtggcaaagtgtgtgtgcttacaacagtgggagattctctctgccaaatgactcaaaattttcgggtttgcttttttttttttctttttcttttattttttatggggatcaaatttggttttgtttccttttgtatatcaccctacctcgttgagttatagtggttgtgctaatagtttcagtttttcaaaaaacggaaactgaatacaatggaaattttctc

SEQ ID NO: 8073 - DNA, 612 bp, Glycine max
tttcagggttttttgtgcccaatattaatgtcggtttttttatattataataaggtttttttcgtctttatcttttttatttttttttttgagtgtagaattatatatcttgtatagtaaaatgatgtgtcaaactacatgcatggttgatggaaaaccggtcaacctatgacagccctagcacggatatagattccatgcttttatttcttaattctacatactatacttattacatggagtacacacgtatgtgtgtcttcagttcatgtttgtgtttttttacttcagcaacatttgcagccctttcgaccgcagcatttgcatcctccgccatgtccaccgccatgtccccagcctccaccatgtccccagcctccaccgtgtcccccgcttccaccatgtcccccacttccaccatgtcctccacttccaccacttctccaggcatctggccgtgtctttggttcttctgcttgtgtcgcatctttggatggctcagttgccacaacacagatgagaagcagtgcgcagagtaagcacaaggagaaaaagggcttggtattcatctttgcaattagtttaattatataagatgagcggacgcgtggg

SEQ ID NO: 8074 - DNA, 1251 bp, Glycine max
atattcactctcttctatcccttgcctcaccaccttaaatttgttatgcgcgaacacttgaaaaataatagtgaaaatgtggagtgctcccacagatgaacgatgtttggttgtttatctgaccttcttgaacaatatttgtggaagctgaatttctgttttcaaactggggtctgttgaaagatggactgtcttgagggagcacctgctggattcgttgatgacttgatggtcctctaaaggaagtccccaaactaatcatggctcccatctaatgtatcacccttggtagggactggtggaaatggtatcctataggtaaatacgctggaaagatcttaatgggctggtaatctgacttaccttcccacttctttcctctcccttgggtgtttccaacttcctgttgagagcatagcctgtgccacggttggctgttaaaattgaaattatctatttatttagtagtttctatattgccctacagagtttttagatattcaatcaaaactctgaagtaaataattgggtgttctaaggttgtggcataacatgactttctgatctggcaaaagattatccatccaggttcaattgagttcatgaatggtctggatttcactacatcaatgccctctggctatcaagaggctggagagcctgtattgttgatcagttaatttggaaagtgaatttcgaaaaagttaattatttttgcgtatgaatttactttggaaaagagagaactattttctgattattttttcgtcttccagcaggactctttaaggggtggtggtaaatggagcaatggagctgagatgactgaggaagaagcattagcagagcagcaaaggatgtttgcagaggcgcgtgctaggatgaacggtggagccattgcttccaagcagccagatgctgaccaaagtttagatagctaactttaggatcttcattgaagcatagacaaagcaccaccctgactcctgtctgtgcttccaatgagctcgatggtgtacaaaaaccattcactagtttgctggcccatgtggatgtgctcatttgtattctttcgataaatccatatttgtaagtcaatgtaattagtgagagatcatgaaaaccctcccgtttagcatttacttgtaattatttaatttacgtttttgtatcttctacatactaacaactcctagcttgattctgacagtagctactatgttagattgtaacaaattattaaatatgtag

SEQ ID NO: 8075 - DNA, 800 bp, Glycine max
cccccgtttttaaaccccggcccgttaatttatttttgggggccccttaaaaaaaatttttctttccaacccccgggacttaaaattgggtccttttaaagggcccccccctttttttttttttttttttttttttaaacctttttttttttttttttttttttttttttttttttttttttttttttttttttttttttttttttttttttttttttttttttttttttagaaatatatatgctgtatagtaaaaagatgtgtcaactacatgcatggttggcggaaaacattcaacctatgccagcccaagcacggatagagtccatgcttttatttcttatttcttacatatatactagttattacatggagtacactcaagtatatgagtgtgttcagttcatatatttgtgatttttacttcagcaacatttgcagccctttcgaccgcagcatctgcatcctccgccatgtcctccaccgtgtcctcctccgccatgtcctccaccgtgtcctcctccgccatgcccccagtctccaccgtgtccccagcttccatcatgccccccacttccacctcttccccaggcatctggctgtgtctttggttcttctgcttgtgtctcatctttggatggctcagttgccacaacagagatgagaagcagtgcacagaggaagcacaagaagaaaacgggcttggtattcatctttgcaattaggttatataaagatgggcgcgtgggcggccgccggggcggacgcgtgggcgtacgtcgtgggtcgagccggacatt

SEQ ID NO: 8076 - DNA, 1284 bp, Glycine max
  misc_feature (1142)..(1142): n is a, c, g, or t
  misc_feature (1220)..(1220): n is a, c, g, or t
  misc_feature (1223)..(1223): n is a, c, g, or t
aaggcgccacgtcatccatcccaaaagcattcatcaataaactgctaagctaactgaactctccctctctccttcctcgttcctttcgcctctcactacaaatacacatctcatctcatccgtctctcacttttaatttttctctgcaatctgaaccttccggatttcgtttttctttgttccggtagccagccagccagccatggtgctcttcaatgtttcacgcgttgagaccactcccttcgatggacagaagcctggaacctctggtctccgcaagaaggtgaaagtattcgtgcaacctcattacctccataactttgttcagtcaacattcaatgcattaactgtggaaaaagttagaggtgcaacgctagttgtatctggtgatggtcgttatttttcaaaggaagctattcagattataactaaaatgtcagcagcaaatggagtaagacgtgtttggattggtcaaaatggattactttccactcctgcagtatctgctgttatacgtgaaaaacttggagctgatggatccagggcaacaggtgcatttatactgacagcaagtcacaatcccggtggccctaatgaggattttgggattaaatataatatggaaaacggtggacctgcaccagagggaattactgacaagatatatgaaaacacaacaacaattaatgagtacttgattgcttcagatctgccagatgtggatattacctcaacaggtgttacaagctttacaggccccggaggaccatttgatgttgaggtttttgattcagcaagtgattatataaaattgatgaagtcaatttttgattttgaatctatcaggaaactgctgtcatctcctaaattcacattctgttatgatgcactacatggggttggtggagcatatgcaaagagtatttttgtggatgagcttggagcacaagaaagctctttactgaactgtacaccaaaggaagacttcggaggaggacacccagaccccaatttgacatatgcaaaagagttggttgctcgtatgggattgggcaaatccgaaccccaagaagagcccccagagtttggtgctgcttctgatggtgatgcagatcgcaacatggttcttggtaaaaggtagngttgtccttaatttgtgatgaatttaaatattctctaacttttttgtgtaatatctgtgtatcccctgtttgttaggnttnttgtcactccttcagattccgtggccattatcgctgcaaatgcctgtgaagctataccata

SEQ ID NO: 8077 - DNA, 1138 bp, Glycine max
gtttgttaggttttttgtcactccttcagattccgtggccattcgccccgcgcgtccggttgaagctataccatacttttctgctggtttaaagggtgttgccaggagcatgccaacctctgctgccctggatgttgttgccaaacatctgaatttgaaattttttgaggtccccacgggttggaagttctttggtaatttaatggatgctggattatgttcagtctgtggtgaagaaagttttgggactggttctgaccatattcgtgagaaagatggaatctgggcagttttggcctggctatctatacttgcatataaaaataaagataaacttgaagacaagcttgtcactgttgaagacatagttcgccagcattgggctacttatgggcgccattattatactcgatatgactatgaaaacgtggatgcaggtgcagcaaaggaactgatggcatatttggtcaagctgcagtcctcactttcagaagtcaatcagattgttaaggggataaggtcagatgtttcgaatgttgtccacggtgatgaatttgagtacaatgatcctgtggatggttccatctcatcacatcagggaatccgatatttgtttgaggatggatcacgattgattttccgcctatctggaactggatcagaaggtgcaacaattcgattatacattgagcaatatgagaaggatccatcaaagattgggagactttcaaacgaagcacttgctcctcttgtggaagttgcgttgaaactttcgaagatggaagaattcactggtcgatccgctccaacagtcattacatgaacacattcaagtggaaggtggttagatcctgaagcttctcccagtcatttcatttcttctttgtccagtatcttacggatagccgaacagtagatttggttgtttgcagcctttgctatgggaaattgagtggaatttgagtttctttatctaaattttgatatgctgaataatttgcaacagccgagtgctaattatatagtcttaatataatggtttctcttgtaaaggctttttatttttaggtttatagatctggatacaaacatagtgcatttttataaagtaattgaattataaatagtttagaaaaaa

SEQ ID NO: 8078 - DNA, 1564 bp, Glycine max
gtggacatggttactcctttgtgttcccaattaacatatgaggggctacttgacgagtttctgcacatcaacaatggttctgtagagcttgatgcatctattatgggtcttcagcaagaagggaagaaaactaaaggtccacttaattcaagtgacaagctttttaaggagatacgagatctcaactttgaagttgttgtccagattttgcgccaaaaagctacttccatgaagcaagactacacagaaatgacaactactacgcagacagtttccgagttgaaggactttgtgaaaaagctgaactcattgccagagatgaccaggcacataaatcttgctcagcatctatcaacattcacatcaaagccttcatttcttgggcaacttgatatggaacatacaattgtagaggcccagagttatgatatatgctttgagtatattgaagaactgatccataagcaggagcctttgacaacagtcttacgccttctaatcctattttcgattactaattctgggttgccaaagaagcattttgactacttcaggagagaactactccacagctatggatttgagcacatagcaatgctaaacaatttagagaaagctggactttttaaaaagcaggagtcaaaaagcaattggcttactataaaacgtgctctacagcttgtggttgaagacactgatacggccaaccccaatgatattgcttatgtcttctctggatatgcaccactcagcattcgactggtccagcatgccattcgatctggatggcgtcctgttgaagaaattttgaagctactgcctggacctcatttggaaatgaagaggggtggattctcaaatagcccatcatttgacactttatcagggattcaatccagcatagccaaagtacctgatggaaggcgtgctgtggtgcttgttgtctttgttgggggcgttacctttgcagagatttctgcacttcgatttttatgtactcaggagggaatggcatatgatttgattattgcaacaacaaaaatagtcaatggccaaaccttggttgaaacgtttatggaaaagctaggttgattaatgagtgtagctttgtcagtttatcatcccgagtatctttgtttgtttgtggtggtgagtttatcttgatgatgccttaccaatgctatgcctaacgagttctctttggacgacactgaactgatggtttgatgaaagctttatttgtgctataaaatcctcctgtattgtttttcttagagggacaatggggggagggtgggacctagtcctttgaggggactgtctggaattaatagtatgagtgctatttttctatgtgctctatttcattgtgttattcttgattttagtccaagagatgaatgaatgatgctagaaattctcaaagctagaaatggtgaagagatgaatgatgctaatgttaaagcaaagaatgttgatccttcatgagttaatgcaagaagatattaatgtgtacaaaattctcttctacactttcaataattgtataggtctatttgataac

SEQ ID NO: 8079 - DNA, 608 bp, Glycine max
gcacgagacagccgggagcttatataacaaacccaaataggttcccaataagaaagaagagtcatcacaaggaaaaaggggaaagaaaagatgccttgcctttacatctccaccaacataaacttagatggagttaacatcgatccaatcttttctcaagccaccactgcagtttccacaatcatcggcaagccagagaagtttgtgatggtcatattgaaggggtcagtgccaatatcttttgagggtaacaaagaaccagctgcatatgctgagatagtttcaatgggtggtataaatccagaagtgaagaggaagctaattaataccattggcaccatattgcagtccaacctatctataccaagaacaagattttttctcaaagtctttgacacaacactattccgtactaaatccaaaatgtaataatatgcttgatctgattatgacatgccacaatattgttccctaatcatttatcgatgagttttaacgtatgttgccactaaaatatgcccatgtgatcttcatttttgcactcaataaaaagaatgccacgtaatatggttatggaaaaaaaatcctttaacttattttccattttt

SEQ ID NO: 8080 - DNA, 2477 bp, Glycine max
cggaattaccgggtcgacccacgcgtccgccctcccctagctttgtttctgctctgccccttccccttcttcacttctcctctgaatgctaatttgaaccaaagcttgcaactaggtaaagacacatacttgaaaatgaggggtcctttgggtgcagtaataggaagatacccatcaagtgatggagttacccaaatgggtggaattataaggcacaacaggaaatgcagggacatcactgttctagtgatcttcatagctttttggatagcaatgatcgtccgcgccggttttggtttcaaccaaggaaacccactgaggcttacttatggacttgactacaaagggaatgtgtgtggggacaagcatgcacaccctggccttagtgaattagagctcagatattggcaaaatcctaatcaggtttatcagagtggattgaaggatagccaattcaaactggctgatgcccgcagtatatgcttgtcggagtgccctatgccttcagaagattcccttaattgggtgtgtgattatcctgaaggagatattcgtctttcgatgaaagattggattaataggaactatgattattttgagttccttacaccagaaatgagaaactcgtctcttcaactacagggtccttgttatcctgtcatatttcccactgtaaatgtttactggagttgccaatttattgctcgggcgtcaaatacatctttgaagcattggcagcagatgggtggagttaacatcaacgaagacattgttattgacaagtcaattcacaagtctattaattctcggtcagctgtcttagagagatacatggcagacataggaaaggcatggcctgtgctgattgtctgcggagggattttgcctctttttctgtctgtgatttggctgatgatgattcgacattttgttgctgctatgccttggataacagttgttctctttaatgttctaataatatctgtcacaatgttctactacctaaaagctggatggattggaaatgatgcgatttctcccatcattggtgagcatgacccatacattagtgtatatgggagggagctgactcatatacgagttgtcactatacttatgacctttatcatggttgttgccattcttacatcaattgccattgttcgccgcatccttatggcaacatctgtcctgaaagttgctgcaaaagtgataggagaagttcaagccctcattattttccctctcataccatatactgtccttgcagtcttttacatgttctggatttcagctgctctccatttgttcagctctggccaggttgttcagaataattgcaactctaactgctgcacatatgatcttattgcaaaacgggtaaactgcgatcgttgttgtggttatagcattcattacacaccacatattggagttgccatccttttccacctatttgggtgttattgggctacacaatttttcatagcttgctcctcaacagtgattgctgggtctgtcgcctcttattactgggcacgcggtgaaacatctccagaaattccttttctttctgtcttttcctccatgaagaggcttatgcgttacagtcttgggtctgtggctcttggctctctgattgtatcatttgtagaatcaatccgctttctgcttgaagttattcgtcgtaagctaaaagtctcaagtcataggcatgacagctgcttaggcaaggctgcataccaatcttctcaatgttttctcaggtgtattgaatggaccatcaaatcagtaaaccgaaatggttacatcatgattgctataactggcaaaagtttctttagcgcttcttttattgcaacagaactgatcatgaataacattctaaagattggccggcttaacgtgatacgagatgtcattttgttccttggaaaactgtgtgtcagcctctcatgtgctttgtttgcgttcctcatgttggacacacacaagtacaactctgctcataacaagacctcatctccactcttacctgttgtgggttgctgggctcttggatacattgttgcaacccttttctttgcagttgtggagatgtcaattgataccatagttctctcattctgccaggatttctgaagagcaccaagggacagcacagtatggctccacccctttctcgttgagacactcagtgaccaaaatgagatgcagagactcacacaaggaccctaatgaaacttgtcctcttgtgtaattttccgctaaatatgacaacatttatatatttttattaaggtgcatatttttgccaccgtagttctgttcttacatcacttgtatatatattatactgttacaatgatggactaaggtgggttggcgaggttaccttttgacaaatgggttatcatgggcgcaaagatagcacattcattattatcctttccttatattattaaaatatttttctc

SEQ ID NO: 8081 - DNA, 1901 bp, Glycine max
gtgtttgagccttgaggccaccttaaaacattcaaactctcttgctggcacaacaaaacaacgacacacaacaagtaaaacctgagagagagagagggtaaaagggtattagatccttcaaccagatcaaattgaaaacaacaaacccatttcttggtctagatttgttagcattgcagaagaaccagatacccccaacaatggaggttgtagagaaggagaagaagaagtacatcacctcagaggagctgaagggtcacaacaaggagggagatttatggatctcaattcaaggtaaggtgtacaatgtctcagattgggtgaaggagcaccctggtggtgatgttccaatctcaaaccttgctggccaggatgtcactgatgcattcatagcataccatcctggcacagcatggtcacaccttgacaaattcttcactggctaccacctcagtgacttcaaggtctctgaggtgtccaaagactacagaaagcttgcatctgagttctcaaaattgggtctttttgacaccaaaggccatgtcacttcttgcacccttgcatctgttgctgttatgttcctcattgtgatgtatggtgtgttgaggtgcactagtgtgtgggctcatttgggctcaggcatgctattagggttgctttggatgcaaagtgcttatgtgggtcatgattctggccactatgtggttatgacaagcaatggtttcaacaaggttgcacagatcctctctgggaactgcttgactgggataagcattgcttggtggaagtggactcacaatgctcaccacattgcctgcaacagccttgatcatgaccctgatctgcagcacatgccggtcttcgccgtgtcctcgcggttcttcaattcgataacttctcatttctatgggaggaagttggagtttgatttcattgcaaggttcttgatctgctaccagcacttcactttttacccggttatgtgtgttgccagggtcaacttgtatctgcagaccattctgctattgttttcgaggcgtaaagtgcaggatagagccttgaacataatggggatccttgtgttttggacttggttccctcttttggtgtctttcctgccaaattggcctgagagggttatgtttgtgcttgctagctttgctgtttgttccatccagcacattcagttctgcttgaatcactttgctgcaaatgtgtatgttgggctaccgagtgggaatgactggtttgaaaagcagacaagtgggacattggatatctcttgctcctcttcgatggattggttcttcggtggcttgcagtttcagcttgagcatcatttgtttccaaggctacctcggtgccaattgaggaacatttcgcctttggtcagtgacctttgcaagaagcataatttgccttataggagcttgtcattttgggaggccaatcagtggacaattaggaccctcaggactgctgccctacaggctagggacttgacaaaccctgcccctaagaatttgttgtgggaagctgttaatacccatggctgaggtatttggagtttatagagtttaggattttgtcaaggtcttttttttttgttttctctttaaaaagaaaaaaaattctcattgtgattttgctagcccccacttttccagattgggctttgaatttaactttttgttaggtgtggtgtacaaatggatggtgatccagatgttactgcagttcatgtgctttgcatcaatacaaattcatatcatgtatgcctttttgccttttcacttctttttccttatcttggaataggtttcttaatgtctgaaagatattataccatggttgatcttaataaagatagaaagatttcatcaataaaaaaaaaaaaaaaa

SEQ ID NO: 8082 - DNA, 1191 bp, Glycine max
attaagatgattttctgagtgtaccattaattttttttctgaggtctaattagtaatttactacttggaatactattcaagattgaggaagaagaacgaagacttgaagcagtaattgaagaaaccgagagacagaatgctgaagtaaatgctgaactgagggaactagagttaaaatcaagtcgctttaacgaattggaggagcggtattggcatgagttcaacaattttcagtttcaattaatttctcatcaggaggagagagatgcaattttggccaagattgaagtttcacaagcacatttagaattattgaagcgtacaaatgtgctcaatgatgccttccccatttctcatgatggagagtttggaacaattaacaattttcgacttggaagacttcctaaaattcctgttgaatgggatgagataaatgctgcctggggccaagcttgcctccttcttcacactatgtgccagtatttccgaccgaagtttcaatatcgaataaagataattcctatgggtagctaccctcgaatcacagacaccaataacagtacttacgagctgtttggtcctgtcaacttgttctggagtactcgctatgacaaagcaatgactttgtttttagcatgcctcaaggattttgcagactttgccaaatctaaggatcaagagaataacataccacctgagaaatgtttcaaactgccttacaagattgagaatgacaaggtggaaaactattccatcactcaaagcttcaataagcaggaaaattggactaaatctctcaagtacactctttgcaatttgaaatgggccctctattggtttgttggaaatactaacttccagcccctttcagcaatggtatcttcgcatgctgaagtgcctgctgtagggtctctgtacacgaagcgtggtgttgatgccaaatctgaatctcgaaattgaacctactaatcatatgctaggttaggctacatagttaggccacatacaaatgtgtacatagaactacatagtcaaaattgttactcgatcaaattgaaaaggatgttataagggtctctctcaatttgaagataaaaagggtgctgatttgtaccactaattggattgaaatttagagcattctcttaataagaaatcacaatttgatgtcacaaaaaaaaaaaaaaaaaa

SEQ ID NO: 8083 - DNA, 839 bp, Glycine max
ccgctcaggcggcgggcacatcttcatttttgaaattagaaaccatctcttcctctctcagctgtctttttaatcccccttttctcattttcccttttgcaattttcactaacagtccttctttctatcttagctctcagaaacttcaataacaatgaagaaagttgtgttgaaggtggaagtacatgaagacaaaatcaagcaaaaagctatgaaggttgtctctggcatttcaggggttgagtcagtttctgtggacatgaaagacaagaaattgaccgtaattggggacattgatccagtaaaagtagcagccaagctgaggaagctttgtcacgcagaaatagtttcagttggaccagcaaaagaggaaaagaaggaagagcctaaaaaagatgataaaaaggaagatgacaagaaaaaaaatccaccaagcgaaatcgtggcagatcaactcaagttctatcaaacccatgcctattattatcagatgaaaccacaatacaatccatattacagtgccataagtgtggaagaggatcctaatagctgtgtcattatctaaattttttattactaggttggatcaaacaaattattccaaaaaaatatatattgtatttgtattatctccgtttcttctaatgatttaaattttaaattgagggatagctagctagtgtggccaaacagtaagattagtatggtatacatgcttagattttgttggtttcaaacaaaacttatccagaatcttgttgtcttacttataagtaacaactaagaaatattcggcgattgagtaaatttgagtgtaattttaatatatatgtgcaggg

SEQ ID NO: 8084 - DNA, 1178 bp, Glycine max
  misc_feature (4)..(4): n is a, c, g, or t
gcgnggggtggcaaacacattcaatcagatccatgtgacatggtcacattctcaaaccattgcacacaaaaaagggaatgattgtttcattatttgttatatatatatattctccttattttcatgcactttttgtcaagagagaaaaaaatatggggaaaacactttggttctttttggttttcacatgccttttgattcctctagcagttgcagattggaacatactgaagctgcagacacaagatggattgaagatcagcctgaagaactattgtgaaagctggaggatgaatgtggagctgcacaacattagggacttccaagttgtgcctgaagagtgcactgaatacattggaaaatatgttaagtccacacagtacaaagtagactcacagagggcatctgaagagtgcttggtttaccttagcaccagctgtaatttgaagaaagatggattggatgcttggatttttgacattgatgataccctgctttcaactgttccttactacaagaataatctatatgggggaaagaaactgaatgtgacatctctagaggaatggatgcgcaaaggcaatgcacctgctcttgatcactcattgaacctatacaatgaacttaaatccaggggtgtgcaaatcattttggttacttcaaggaaggagcatctcagatcagccacaattgacaaccttgtcaaagttggttattatgggtggactaaaattgtctttagagatcctgctaatgaattggtgtcagtgcaaaagtacaagtctgatgtgagaaggcaaataataaatgagggttatcgcatttggggcattgttggggaccaatacagtagcattgaggggattccaaaccccagaagggcatttaaactcccaaatccaatgtactatgttgcctaatgaatctcattcactgtgattgcattatttctccctcattttcaacttatataaatgataataatttgttgcaataagttaaacaaaaccagccaggttaggttggctttgttcttcttaatttccttgtttaattaaactaaggcgttacccagttctaaattgtaggtaaaagtaaaaatacttgaaagatatttggcgtgccaatttaacaaccatatgctcaatagcatcattaataatattttttttcggaac

SEQ ID NO: 8085 - DNA, 1067 bp, Glycine max
accagaggcagtgagctatacaatccaaaatacaaacgaagcgagaggcgttctatatattattgaattgacaatgaggcctgctcttgctttgcttcctcttctatttgctttcttgttagctgccactacagaatcaagaaaagatacaggggaatattggaaaatgatcatgaaagatcaggaaatgccagaaggacttcaaggtcttgtttcatttcaatctgaaaataaccctaagactcaagagcagcttggtaaaggttccaaaaaccattgtgaagagtctctagttacaaatacacaagttaatagtgacttcgaacccataccaagtgttaccaaatatgatgatttggaattcaagtcaagcattatcaagaacgatgattttgaatcgagaccaagtgttaccaagcatgatgattttgaactcaagtcaagcgttaccaagaacaatgattttgaaccgagaccaagtgttacaaagtatgataactttgaacccagaccaagtgttaccaaatatgatgattttgaactcaggtcaagcgttaccgagaatgatgattttgaaccgagaccaaatattagtaagtatgatgactttgaactcaggtcaagcgttaccgagaatgatgattttgaatcgagaccaagtgttaccaaatatgatgatttagaactcaaatcaagcattaccaaaaacgatgattttgaaccgagaccaaatattagcaagtatgatgactttgcatccaggtcaaataccaagtacgattctgaacctaaagcaagtgctaccaagtatagtgattaaatgaaaatcaagtaattgtataatacagtcgaagaaaatcgtgctccatatcaatgtatcctatgaataaatagggtgtgaagtattatagattttgaataacttcggctatgttggactaaaagttggaaaaataaaaatatatatttgctttaattaaaaaaaaaaaaaaaaaaaaaaaaaaaaaataacactcgactcttgttctcaagctaacctaaaattaaatatttactcttacatgggt

SEQ ID NO: 8086 - DNA, 964 bp, Glycine max
gcctttgcccgcggcgccgcggccgatacagtccggaagacaaacgaggcgagaggcgttctatatattattgaattgacaatgaggcctgctcttgctttgcttcctcttctatttgctttcttgttagctgccactacggaatcaagaaaagatccaggggaatattggaaaatgatcatgaaagatcaggaaatgccagaaggacttcaaggtcttgtttcatttcaatctgaaaataaccctaagactcaagagcagcttggtaaaggttccaaaaaccattgtgaagagtctctagttacaaatacacaagttaacagtgacttcgaacccataccaagtgttaccaaatatgatgatttggaattcaagtcaagcattatcaagaacgatgattttgaatcgagaccaagtgttactaagtatgatgattttgaactcaagtcaagcgttaccaagaacaatgattttgaaccgagaccaagtgctaccaaatatgatgattttgaactcaggtcaagcgttaccgagaatgatgattttgaaccgagaccaaatattagcaagtatgatgactttgaactcaggtcaagcgttaccgagaatgatgattttgaatcgagaccaagtgttaccaaatatgatgatttagaactcaaatcaagcattaccaaaaacgatgattttgaaccgagaccaaatattagcaagtatgatgactttgcatccaggtcaaataccaagtacgattctgaacctaaagcaagtgctaccaagtatagtgattaaatgaaaatcaagtaattgtataatacagtcgaagaaaatcgtgctccatatcaatgtatcctatgaataaatagggtgtgaagtattatagattttgaataacttcggctatgttggactaaaagttggaaaaataaaaatatatatttgctttaattaaaaaaaaaagaaa

SEQ ID NO: 8087 - DNA, 1339 bp, Glycine max
atttcatactacaacctcgcagttcaaaagttcaaaccccaaatcttcaaaatcctcacagcaaacccaaaataaaacaacaacaacaacataaaaaaaccttaacaaaaccaaaaccccaagagaaaaacaccacacttccaatcaaatgttcttcctctctttgcccttctcttcctgcttcagagcttcacaacccaaccacgatcccaccaccctctcaacgaacctcaccacctacatctaccacaccgaatacggcaccgtttcgctgacatggtcacgctccatgctaggccgctccctccacgtgaacctccacaaccactcctcctttcacctccacgtcaaaccctggaggaaaaaagggtccaagaagctttctcacaacacggtcttcctctggaacctctcctccgcgagattcgaatccggacgacccgaacctcgctccaggttctacctcgccatcgaggtagaacacagcctcagcctcctcgtgggggacttatcccccaagagtaaggccaagaagcccagcaaaacacagcagcagctccttgttctcaagcgggaccacgtccacgtggcgccacaccgcagccgggtgtatcaaaccaaagcgagactcggaggtaaggtaagggaaatcgaaatagattgcgacggttacaacggtaacggtggcgggtacgagaacgagaacgagagtagtttaaggttgttgttcggtgtggatggagagaaggttctggaagtgacgcggctgaagtggaagttcagagggagcgagcgtgtggagatcgacggggtgcacgtgcagatctcgtgggatgtgcacgattggcttttcgagaaggataaggataataatcattgtagtactaataacaataccaataatagcggtaatgagggtcacgcagttttcgtgtttaagttcgaggaggacgaggtacgaggtggtggtgggaaggaggaggagcaacagtggagtttggggagtggtggggagtggaggaatgggaagagttggtcttcttcatctttgtcggtgtcttcttctgttgggtcttttggggggagttcttcggttatggaatggtccagtcggaggagaatgagttggtggttcctcttgggttttctttggttgtttatgcttggagaaggtgagcattaatttgggtggtttttgtttcatttttcccccctttacagtaaaattttagggggaaaaaagaatgaaattagatattggcatgtgtatagaaaaatatatgttctttgaatgaattttattaatactccaaaaaaaaaaaaaaaaaagcttatcgat

SEQ ID NO: 8088 - DNA, 1466 bp, Glycine max
ggctcgagcaacctcacaattcgaagttcaaaccccaaatcttcaaaaacctcacaccaaacccaaaataaaaaaacaacgtaaaaaccttaataatagcaaaaccataaccacacttgcagtcaaatgttcttcctctcttcccccttctcttcatgcttcagagcttcacaacgtaccaaccacgatcccacaaacctcaccacctacatctaccacaccgaatacggcaccgtttcactgacatggtcgcgctccctgctaggccgctccctccacgtgaacctccacaaccgttcctccttccacctcctcctcaagccatggaagaaaaacgggtccaagaagctttctcacaatacggtcttcctctggaacctctccaacgcgaggttcgagtctggactcgaacctcgctctagattctacctcgccatcgaggtagaacatggcctcagcctactcattggggacttatcccccaggagtagtaaggccaagaagcccagcaaaacaaaccaattactcgtcctgaagcgggacaacgtccacgtggcgccacaccgcagccgggtgtaccaaaccaaagcgaaactcggaggtaaggttagggaaatcgaaatagattgcgacgtttacaactgttgcggatacgggtacgagaacgagaatagttcgaggttgttgttcagtgtggatggagagaaggttcttgaagtggcgaggctgaagtggaagttcagagggagcgagcgtgtggagatcgacggggtgcacgtgcagatctcgtgggacgtgcacgattggctttttgagaaggataaggatattgttaatcatcgtagtagtaacaacaacaatagtaataataatggtatcgagggtcacgcggttttcatgtttaagttcgaggaggacgaggtacgaggtagtggtggtgggaaagaggaggagcaacagtgaagtatggggagtggtggggagtggaggaatggcaagagttggtcttcttcgtctttgtcggtgtcttctacttctggtggatcttttgggggaagttcttcggttatggaatggtccagtgtggaggagaatgagttggtggttcctcttgggttttctttggtggtttatgcttggagaaggtgaacactaatttgggtggttaaattttttgtttatttgttttcccttagagtaaaagtttagggggagaaagaatgaatttagatatccatgtgtatagaaaagtatatgttcttaatactctaagagtttagtctttaattagggcaaaagatagtttaatttacccaaaaccaattgaattcaagttcttgtaatgcttgaatatttgcatgtatggaagcctgtttgtcgagagaagtcaaaagatcacgatgtacatggaataacacatctgttaagagaagtcaattgaaactccttattaacaaaaaaaaaaa

SEQ ID NO: 8089 - DNA, 2081 bp, Glycine max
aaactttgctataatatactttgttgatgctttgtattccactattcatctggagaaaacattatatctatattacctggttaacttatgaatgtgaatcattttatttcatttcaggaaactaactttaaggaatggaggcaagtggtgacagaaattaaccgtttcacgaaagttgacaagggctttagtttcaggcccatgcgttattgtgccacatttgatactcatcgagcttctcttccttatgtggctcgttttcatgcaaagagggttttgaaatttcaagatgcactgttgacaagctatcatcgaaatgaggttaatactgattcatgttgccagggttgttattagatttggattaataaattactttagtacctgaaagcgctcggccgcgtgaagccgtctgtagcctctcgaaatgaggtcaagtttgctgagcttacattggacatctatagaatgatacaatgtttagaatgggagcctagtggagtattctaccaaaaacatacagttaaacctaaggagaatggtgacataattgatcattcaggagcttccgggataatagacatgaatcttactgcagatatgaccgatccaactgtacctcctaatcctagaaaggcttccctgtaccgtccatctgtgacacatgtgatagcagttttggctactatttgtgaggagctgccaccagactgtgttgtgctagtatatctttcagcctcagggaaggctggtcttaataatgtctctcaggtggagaattttagcggttcatccaaatattcaagacacaaagtcctttcccagacttcccaaggacagaattctgaaccttccgaaactcaaaataatggcaagagagaactgagctattatgacaattatctgtggtttggtcccaagggaaatagtggttcaaataatctctaccctggtgatcttatccccttcactaggaaacctcttttcctgattattgacagtgataacagccatgcattcaaggttttacatggggctgaaaggggtgaaacggctgctctatttctttcacctttaagaccgattttcaagaatccctctgatgtaaattcaaatagtggaagccaatttacctattttttgactgctcctttgtcagcattttgccaaatgattggtctctcccccaacgagtctgatacagatgtctacaatgaagcagagaacataatcgctaatgctttgactgagtgggaaataattctttgctcatcaactaccatggatttagtatgggcgcaggttataagtgatccatttctaaggcggcttattctaagattcatattctgccgatccgtgatatcttttttctgcccacctgaggaaagtgaactgtacctgccactttgtttaccccatctaccgtcttctgttgcaccaacgtctgaagctgtgcgttctgctgttgtgcaacttgccatgcactttgacgttgctgactcctttcactttactgaaacataagattttgggactttaaaaagtaacgagtaaaatgttaggcttacatgcaggctttggaagctaaggattctcagatcaaaggaatacaaaacattatatgagttgacctttcgggcgacaggacaagagtatttactgtggggcatgggctgtctggtggaaaaagagattgtttgcctctgcttgttgtgttgctttattcgaccccacctgcttcattgatctatatgctgtatttggtggtttgctctgtaatgttaaggttaggtcatgatgggtgcatggtgacttttcatgtgtttggtcgtggcaagataattttgtttttgtaacgtggcaagatagttgttagtttaaatatttgttcatacttcatagctttgaaaagggaaaaaaaaaaggaattcattgtcaattttacctttttttagcagaattggacggtattgaatcaacattgattgaggaggatgtattctgggaagaactaattccgtcaaaacccaaaagtaaattacttaccctgtatattcaattttagagttttaccaacg

SEQ ID NO: 8090 - DNA, 1997 bp, Glycine max
acgaggctctctctaagtaagaagtcagaaaccacatcctctgttgtcttctcttattataaaaaaactaactaagctccttgtgcggccaccattcttgttggagatttcaactctttctccttcagacttcttgggtttatgtgatgatggctctcaatatctcttctcctgctgaagtcaagtccatttttttcgctgattacttcaagtctaactgcatcactgcaaagttcacaggtggttttgcttttaagagaaaagagcgtggagctgcatctggagggcgagtttgttgctcagtgctggcaccaccaccaccggcctggccgggacgagcggttccagagcaaggcagcaagacttgggatggaccaaaacccatttcaattgttgggtgtactggttcaattggaactcagacactagatattgtggcagagaatccagataagtttaaagttgtggcacttgcagctggttcaaatgttactcttcttgcagaccaggtaaaaagatttaagcctcaacttgttgctgttagaaatgagtccctaattgctgaacttaaagaggccttgcatgacgttgaagaaaaacctgagatcatccctggagagcagggaatcattgaggttgctcgtcacccagatgcagtcagtgtagtcacaggaatagtaggctgtgcaggactgaagccaacagttgctgcgatagaagcagggaaatacatagctttagccaacaaagagacattgattgctggaggtccttttgttcttcctcttgctcagaagcataatgtaaaaatacttccagctgattcagaacattctgccatctttcagtgtatccaggggttgccagagggtgcacttaggagagttattttaactgcatctggaggtgctttcagggattggccagttgataaactgaaagatgttaaagttgctgatgcattaaaacatcctaactggaatatggggaaaaagataactgtggactctgctaccctttttaataagggtctagaagtaattgaagcacattacttgtttggagctgactatgatcatattgagattgtcattcatccacaatcaatcatacattcaatgattgaaacacaggattcatctgttcttgcacagttggggtggcctgatatgcgtttgccaatcctctatacattatcatggcctgacaggatttattgttctgaagacacttggccctgccttgatctttgcaagattggttcacttacatttaaaactccagataatgtaaagtatccatccatgaatcttgcctatgctgctggccgtgctggaggcacaatgacaggagttcttagtgcagcaaatgagaaagctgtagagatgtttattgatgaaaagattagctatttggatatattcaaagttgtggagctaacatgtgagaagcatcaaaatgaattgttatcctctccttcccttgaggaaatcattcactatgacctgtgggcgcgagaatttgctgctagtttgcaagactcttccagcttcactcctattcttgcatgaggatatgattaaactagggatgtggctgctggtgcttcccaattgcctgctttcaccataatttcttcaggcaattgaacaatttagaatgatgcattccctcagatgttgaaaaataaatagttttttttttttttttgtttatggaatgttggtgttttaacacctttcaattgatcttataggtttgtcgtaatttcattgaaaacaatgtctttttaatagtgaataggagcctaggaggttggttgcctatgaatgtgtcaaagtcaagaaggggggtggatgttctcatgttcaaaatttacatgacgtggtcaactagaagttttgtatttcgctttttataataggattgaataagtgagtcttataaaacttaatagagatagataaaaaagttgaccaatcatcaaaaaaaaaaaa

SEQ ID NO: 8091 - DNA, 2442 bp, Glycine max
ctttctccaaactctatttcgtcctctttctctttaattcctagttacccaccttctttccatttttctgtttttcccgggaattgtttggttgaagagaggaaattatgttaaagaagaatttttcagaaaatagcataggttctactttttttattttaattttaattttttttttcaattctcttttgtttttttatcttccatacaaccaaataatctcatactttcacatttattataatataatagtaatagtaacaattgaaaacaaaaaactgcatctctctctgagaagtcagaaaccacatcccctgttgtcttctacttattatatatatagaaaaaaactaaggcaccctaggcaccacacaacacaacttccttgtgcagccaccattattgttgttattggagatttcaattctttgtctttcaaactcctcaagttgggtttatgtgatgatggctctcaacatctcttctccagctgaagtcaagtccatttttttcgctgattccttcaagtctaactgcctcacagcaaaattctcaggtgggtttgcttttaagagaaaagagcgtagagcagcatctggaggacgggtttattgctcagtgcaggcaacaccaccaccaccagcctggccgggacgagcggttccggaacaaggtcgcaagacttgggatggaccaaaacccatttcaattgtggggagtactggttcaattggaactcagacactagatattgtggcagagaatccagataagtttaaagttgtggcacttgcagctggttcaaatgttactcttcttgcagaccaggtaaaaagatttaagcctcaacttgttgctgttagaaatgagtccctaattgctgaacttgaagaggccttgcatgatgttgaagaaaaacctgagatcatccctggagagcagggaatcattgaggttgctcgtcacccagatgcagttagtgtagtcacaggaatagtaggctgtgcaggactgaagccaacagttgcagcgatagaagcagggaaagacatagctttggccaacaaagagacattgattgctggaggtccttttgttcttcctcttgctcagaagcataatgtaaaaatacttccagctgattcagaacattctgccatctttcagtgtatccaggggttgccagagggtgcacttaggagagttattttaactgcatctggaggtgctttcagggattggccagttgataaactgaaagatgttaaagttgctgatgcattaaaacatcctaactggaatatggggaaaaagataactgtggactctgctaccctttttaataagggtctagaagtaattgaagcacattacttgtttggagctgactacgatcatattgagattgtcattcatccacaatcaatcatacattcaatgattgaaacacaggattcatctgttcttgcacaattggggtggcctgatatgcgtttgccaatcctctatacattatcatggcctgacaggatttattgttctgaagtcacttggccacgccttgatctttgcaagcttggttcacttacatttaaaactccagataatgtaaagtatccatccatgaatcttgcattttctgctggccgtgctggaggcacaatgacaggagttcttagtgcagcaaatgaaaaagctgtagagatgtttattgatgaaaagattagctatttggatatattcaaagttgtggagctaacatgtgagaagcatcaaaatgaattggtatcctctccttcccttgaggaaattattcactatgacctgtgggcgcgaaaatatgctgctagtctgcaagactcttccagcttcactcctattcttgcatgaggatgattaaactagggatgtggctgatgcttcccaattgcctgctttcaccataatttcttcgggcattgaacaatgtagaatggtgcattccacagatgttgaaaattaaataggttttttgtttatggaatgttggtgttttaacacctttcaattgatcttatagttttgtcgtaatttcatggaaaacgatgtctttttaatagtcaataggagcctaggaggttggttggttgcctatgaatgtgtcaaagtcaagaaggggaatggattttctcatattcaaaatttacatgatgtggtcaactagaagttttgtatttctctttttctaatagaattaaataggtggagtcttacaaaaattaacagagatagacacaaaagttgaccaatcaccaatcactttcataaaaggattccttttctttttcctcagcacacattcgttggctgatattattatatgaaattggtattatttggatatcatagctattacccttggagaaaagaattattgactctgcttgacggttttgcttttct

SEQ ID NO: 8092 - DNA, 843 bp, Glycine max
gcgagtgagaatcaaatacaagtaccctataaaaccctaaaaatccattagggttttctcgttcgctcttcgcacaccacactgatggcgtgcacaatcgacttccgctgtctcgacgagggttttggcggcaaaacctacaagcgcaagagagagcagcagtcgcagcctcagcacgacgccgccgccgatgacgtcatcgacggcgcctctctgatggacaccgacgacgcactcccgccgccggcgaagcgatcggcgctgccatcgtcggagaacccggacaagccggcgttcggtcatccgagctacgacggcgtgatcgccgggagggtgtcggggcggaagtggaagcaagtgcggcagcggagggcgtcggcggcgcaggttagccggaaggggacgacgttcgagcagagggagagggagaaggtgataaagaaggcgtacaaggagaggatgatggagctgaaggaggagattcggttgaacaaggtcgagaagaggaagaagaaagaggagagggagaagaaaaagcaggagaatatcatcagatctggaaccaagttccaaaagattacaaaccctaatactttgaagaagatcgccaaatccaagcagaggaagcagcttagggttgttcctgatgaattggttaggaaatagtatgttttgtttttttatctttttcaattcggtttttatatattgctttttggtggaaaattttgtagtattgagatttcaattgatgattagtatacaagtttctgtggtaactgatagttgtttgcttttgagctccctcaggtttcaattaaggatgtaaaattttcacattta

SEQ ID NO: 8093 - DNA, 1747 bp, Glycine max
ggctcgaggaactcttcgtaagttccggaatctacaccacccctaggctcttcgctccaaactccgaaccctaacctaacccaaccatcttcttcgcctcgagcacatcttaccctaattcgattattccccaatttcatcgaaccaatcaataaatcatatacacattttttgtttaatttttgatgccgataaaaaatgccgccgaagcagcagcaatcgaaagctgatttagcgaagaagcagaagattgtagaggacaaaaccttcggtctcaagaacaagaacaagagcaaaaatgttcagaagtatgtccagaacctcaagcaatccgtgcagcccaggcccgatgccgccaaagtcgatgccaagaaaaagaaggaggaagataaggccaaggagaaggagctgaatgagttgttcaaaatcgctgttactcagcccaaagtgccagttggtgttgatcccaagtccatattatgtgagttttttaaagtggggcagtgtgccaagggcttcaaatgcaagttctcgcatgatttgaatgttcagaggaaaggggagaagattgacatttacagtgataagcgtgacgaggaaacaatggaggattgggatcaggagaccttggagaaggtggtggagtcaaagaaaaccgagtataatcagaataaaccaactgacattgtctgtaaatactttttggatgcagtagaaaagaagcaatatggttggttttgggtctgccccaatggtggtaagaattgccattatagacatgctcttccacctggttatgttttgaaatctcaaatgaaggctttgttagaggaagaaagtgaaaaaatatcaattgaagaggagattgaaaatcagcgtgccaaagtggcaactacaactcctatgactcctgagttattctttgagtggaagaagaagaagatagaagagagagatgccaatatagctgcacaacaggcagagagggctaagaatgatcgcatgagtggtcgggagctatttttgtcaaatgctagcttgtttgtggatgatgcagaagcatatgacgtgtaccagagagaaccagaatcttatgaaactgaacagaatgggaataggaatgctgctgaagatggcccctgctcctcagcaacagctgcttctgatggtgaagatcttgatgacatagatgacgatgatgagttagacatggatgagttagatgaattggaagcaagcttatccaagacatcaatccaaataaaggaaacaggagctgaagcttaatccggagaatttttcgcaatcttcatgtgatatttttatgcctctgctgaacaatagagcattttcctgtggccactcgctctccttgcttccaggcagggtttttgaatgaaggctgtggtgataatgatattactatttgctgcatcgcatttggtatgaataatggcagtttggtataatccactttccttttttgttagacctcttattggaccttagacagacatttttgttgtttgaaatgagtagtcttgtgtagactgtacctgatttgaacatgagtttcctctatatgtcgaaaggggtctttaattgttcttgtgcttgtgattttcttgaaaccatcaaagcataaagtggtatttgttatgttatggatgttatagctagataccttgggctttaggggatatttgggattttgaggtggagttagttttcttaccctgttcttggg

SEQ ID NO: 8094 - DNA, 1015 bp, Glycine max
accaggtcacaactaccagtccttgctttgcatcgtgtgagtttgggagaggaaggaagctactcggaaagttattccttcctcagcaaaaaaaaaaccattcctttcgagccaccaagcgcgccccccccccttcttcaccaccactccattactctctccacgcaccccctactacctttgttttgagtttgaggaatataagaaaaatgaaaatgggtaaaggaattgtttttattgttgctctggtggccatttgccttggtgggaaatgggtggaagcgcaggtgcatcatgttgtcggagcagaccgtggttgggatcaaacctccgacctcgtttcttggtctgcaagcagagtcttcagggttggagaccaaatttggctcacttactctgtggctcagggattagtcgctgagctgaaaagcagagaggaatatgaggcatgtaatgtgagcaaccccatcaacgtgtacacagagggtttgcatactatccctcttgagagtgaaggaatgaggtattttgtgagcagcgagccagagaattgcaaaaatggtctcaagctacacgttgaggttctgcccaaggctgatgaacgtatcacagagccttccacttctaccctaacagatgaggctgtggcgcccactactccttctggttcaccacgttatgctcacaacactatgttaaagctcacggttatattgtttctcatcataggtcttgcttactgacacctgtcccaaccctatatatgtatttaagacactattttgggatttgggaccctgctatgtgccattttttttaatgtgggtatatgtctagtttaagaaggattttttttttgtcttgttttatgaatttaactgttatgtttttaagagtaagaattttaattcctgaaattacagtgactacctattgcgctatcagtaactattttattttcctgcagcatttaaaaaaaaaaaaaaaaaaaaaaaaaagcggccgctctagagga

SEQ ID NO: 8095 - DNA, 2331 bp, Glycine max
ctcgagccgttttctctctcttttatcagcttcgcgaattcgccaaatcagaaaacctctctctctctctctctctctctcacccttcccagtgatcaattcaacgatgttagagcagttgctgatattcacgcgcggagggctcatcctctggacctgcaaccacctcagcaacgccctgaggggatctccgatcgacacgttgatccgatcctgcctcctggaggagcgatccggtgcggcctccttcaactacgacgcacctggagccgcatactctctcaaatggaccttccacaacgacctaggcctcgtctttgtcgccgtctatcaacgcgtcctccacctcttgtacgtcgacgatttgctcgccgccgtcaagcgcgagttctcgcgcctctaccacccccaaaaaaccgcctaccgagattttgacgagatctttcagcagctccagatcgaggccgagtctcgctccgagaatttcaaaaaacccaaccctgtccccgcgctggctcccaataggaaacaaaacggcacgtggcaggggcaggggttagggcaaaacgccggatcagaaaaaaaaagtgatggagatgggaagaaagggcgtaaattggagaatgataatttttctgtagctaattctaattctaatgctaatgttaaccatagtggtggtaagagtagtgtgaataataatattgggaaagagaatgagagttccaatgttggggcttttgatgtaaataggcttcagaagcttaaaggaaaaaaagggaatgggaacgggaagaagaaagatgctcttgttgttgctgctgccaagggagagcccaaaaaggtggataagccaaacagggtttgggatcaaccggcgccgcaaaccaaactggactttactgatcacgtggatggagatggggatagaagcgctgactttttggctaaggagcaaggagagagtatgatggataaagaagagattcttagcagtgatagtgaggttgaagatgatgatgatgatactggaaaggataacatgcctgtggctaaaaagaagggttggttttcctcgatgttccagagtattgcaggaaaggctaatttggagaagtcagacctggaaccagctttgaaagctctgaaggacaggctcatgaccaagaatgtggccgaggaaatagctgagaaactatgtgagtcagtggcagcaagtcttgaaggcaaaaagctagcttcgtttacaaggatatcttcaacagtgcatacagcaatggaagaagcacttgttcgtattttaacccctaggcgttccattgacatattgagggatgttcatgctgccaaggagcaaaggaagccatatgttgttgtgtttgttggagttaatggagttggaaaatctactaatctagctaaggttgcttactggcttctgcaacacaacgtcagtgtcatgatggctgcttgtgatacatttcgatctggagctgttgagcagctgcggacccatgcacgcagacttcagattcctatatttgagaagggttatgaaaaagatcctgccattgtagcaaaagaagcaattcaggaagctgcgcgcaatggttcagatgtggttctagttgatacagctggccgtatgcaggataatgaaccattgatgagagcactgtcaaagctcgtctacctcaacaatcctgaccttatcttatttgttggagaagcactggttggtaatgatgcagttgatcagctttcgaaattcaaccagaaattagccgacctctcaacatctcccacacccagattgatcgatgggatcttgctcacgaagtttgacactatcgatgataaggtgggagctgcactctcaatggtttacgtatctggagctccagtaatgtttgtgggctgcggacagtcctatactgacctcaagaaactcaacgtcaagtcaattgcgaagactctccttaaatgagggaacaacataaacctgtcatgaatgtttctgtttgatgagtaacttgattatccccgtagatccccattacatcgtaagacaacattgacgcaatttggtttgtttaatttatattggtaagcttctttcctctgttcaccatgagaataactcgtaaggtgtaactcttatcatgtgtagtacatttaattttcctcaccttactaagtgaataatccatgcgaatcgttcaaatatttattgcgacaaatgcatcgatatctttaaaaaaaaaaaaaaaaaattttgcaaaatgaaacacatataagatttagctcgaccttcaaaaaaaaaaaactcgc

SEQ ID NO: 8096 - DNA, 1797 bp, Glycine max
gttgtttttcataactaggatacatgagagacatcaaaatatttactgtactatttgttttattttacatgctccttctattgtcattttgcctactttccctcgagcccgcctcgttagccccccccccaaaaatattgcataaataaaggattggattttcttgtgtagtttcctttttctattttctttctctttttcagttttctctgttcctctgctttcatttcttacattttcaactcttcattaactttcttgctaagggaatcttcgtcgtggaatctgaggaaacgtcagtatgaaaatcaaggaattttcctcgccataatgaacgagagaatcactagaggcacatgttggtagaagattttctctggggattgacttgattgattgttcacagttcatgctaaacaaccaaccaaacggctattctgactattttttgatcctgtttctaatcttgtttcttagactgtgtctaagtcttcctttcaggctttgtgaattgaattccgatgtcacagccaaggcaaaataagatgatgagtccaaaccttgcaaaacaagttggtgacgcaacctataccaagatttttgttggaggactggcttgggggactaagagagacactctaaaacgctattttgatcagtttggggagatcttagaggccgttgtcatcactgacaaaatcactggaagatcaaaaggatatggctttgtgaccttcagggacccaaattctgcaataagagcttgtcataatccctatcctgtgatcgatgggaggagagctaactgtaatcttgcagctcttggtgcccagaaatttgatccatctataacaggaaggcaaaaactcagtagcccgtcatggaatatggcaccaatcccattgcaaggcacttccacttattataaccagcacataccccactatccatttccgtatccagcctacagtccagccttcaggtatcctggttatcctcacccacaagacttgtatgaaatgaactacaataatgcatatggtggacagcagcttccactccgttggttgccagcatattgccaacccttttatggccttggtagacagtttattccaacagcatatgtgaaaaaggcacaaacccccaacatgtcacctcaggagttcacagtcgttggcttctcagaacctatttcagcttctccctcaatttccagcactggattagacacaggaacagtacctgcaacaggagtgctagaatccccccaagaacagaagtcttcaacttaaagctatgatgtcaattgactagaatagtgaaagtaaaaagaaaaatgacgctgctcaataaaccaagaagctctgagtacatgctcgatgaggtggtccagcaaaggaactaaatcaagcaataacgtattgagatttcccatcgatggaacatctgatcttagagaccagacactgaggatgaaatgaattctggatttgttcattgtctttgaacatttttacttttcagcattctagtgcacattattcattcttcggttttcctttttttcttcattttaattttcttttttaacattggattcctgctaagctatagttgaaaaagaaaaaaaaatgtttgttattattcttttattcttatacctatgctttgcattcctattttgtgttagttagctgaactaaaattgcaagagtaatatcagcatttgtttccatgtgtcccagatcatagcaattctatctctttttagctgaagtaaaactcggttttgga

SEQ ID NO: 8097 - DNA, 1626 bp, Glycine max
  misc_feature (1606)..(1606): n is a, c, g, or t
ttccgcggcgagaagacgacagaagggggtgtaagacaagtttttctgaaagcaacaaatagaaaaagaggttgggacatggaatagaaattggattctggcctcctccctctgttttaaaatccatcagcagccgccaactctctcaataaaacctgctttctatttttctcaacctaaaatcccatccaccaaccttatgatgatgtcttcactctctgtttcgcgccacaaccacctcttctcgggccctctcccggcccggcccaagcccaagcccagcttttcctcttccaggatccgaatgtccctccaagaaaacggcccctccatcgccgtcgtgggcgtcaccggcgccgtcggccaggagttcctctccgtcctctccgaccgcgacttcccctacagctccatcaaaatgctcgcgtccaagcgctccgctgggcgccgcatcacctttgaggacagggactacgtcgtggaggagctgacggcggagagcttcgatggcgtcgacatcgcgctcttcagcgccggcggctccattagcaagtacttcggccccatcgccgtcgatcggggaacggtggtcgtcgacaacagctccgcgtttcggatggacgagaatgtcccattggtaattcccgaagtgaacccggaagcaatgcaaaacatcaaagccggaactggaaagggcgcactcattgctaaccctaattgctccaccattatatgcttgatggctgctacccctcttcatcgacgtgccaaggtgttacgtatggttgttagtacctatcaggctgctagtggtgcgggtgctgctgcaatggaagagcttcagctgcaaactcgtgaggtgttggaaggaaaaccgcccacttgtaaaatatttaaccgacagtatgcttttaatctattctcgcataatgcgtctgttctttcaaatggatataatgaagaagaaatgaaaatggtcaaggagaccaggaaaatctggaataataaggacgttaaagtaactgccacatgcatacgagttcccgtcatgcgagctcatgctgagagtgtgaatcttcaatttgaaacaccccttgatgaggacactgcaagagatattctgaagaatgctccaggtgtagtggttattgatgatcgtgaatccaatcattttcctactccattggaagtttcaaacaaggatgatgttgctgttggtaggattcgccaggacctatctcaggatgggaaccaagggttggacatctttgtatgtggggatcaaattcgcaagggagctgcacttaacgcaatccagattgctgagatgttgctatgagatctggtttttaaaggatgtggtacttgaagactatgcttcttttgaaacagttttgtatcttctagttgtatgaggttattcatttcttttgtgagaaagtacgaggatcttttcaacgatgtggtagcacactaactggaaacagtttttttaaggttttgtgcttaatttctgtaatccttatcaccgggaataacaataattggttatggcaaaggagaatcacctaatgtttcatcttttgaataaagaatttgttccctntaggggaaaagagaaaatat

SEQ ID NO: 8098 - DNA, 520 bp, Glycine max
  misc_feature (477)..(477): n is a, c, g, or t
aaaaccctaccccgcgacttccctccggttgcttccgccgagcgacttccaatccagtctcccctcgattccgccggcccgatcgcctcgatcaatctcgtccccggctgcgccctcccgtcggttggagatggccaagacttgcttcaagaccgagcaccccctggaaaggaggcaagctgaatctgctaggatccgtgagaagtacgctgacagaattccggtgatcgttgagaaggctgataagtctgatgtcccggaaattgataagaagaagtaccttgtcccggccgacctcactgttggccagtttgtctacgtggtgcggaagaggatcaagctgagcccagaaaaggccatcttcgtctttgtgaatagcaccttgccaccgactgcttcgttgatgtcagcgatctatgaagaaaacaaggacgaggacggcttcctgtacatgacttacagtggcgagaacacttncggctccgcctaatccatgtgcgctgccactgtaaataaatga

SEQ ID NO: 8099 - DNA, 1689 bp, Glycine max
ccacgcgtccgggagaattacccaagtctccaatctaactccaaacgtgtcatggaagataaactgaatttagagtccctggacctgttagtacagggatttcccaaattagaagacccttcaacagatatcactaagaaggatcctttgttgctgaaagctgtgactggaactgagatagactatgtgttgaatactgctaaagatcctacatattggtcaaaggtttgcttgtatcatatggtcaaattggcaagggaagctacaacattacggcgtgtcctagagcctctttttcactattttgatactgaaaatcaatggtcttctgaaaaaggagttgctgatcatgttttgatgtacttacaatctcttttagcagaatcaggagataactcctgtcttcttttgtccattttggtcaagcacttggatcataagaatgttgctaagcagcctatccttcagattaatatcattaacactacaacaaaacttgcacaaaatttgaagcaacaggcttcagttgcaatactcggtgcaatatctgatctcattaaacatttaaggaagtgtctgcaaaattcggctgaagcttccagcactggaaatgatgggcttaagctgaatactgaactccaatttgccttggaaatgtgtatattacatctttccaaaaaggttggggatgtcggacccattcttgatttgatggctgtggtgttagagaatatctcaagtacagccatcatagcaggaacaacaatctctgctgtttatcaaactgcaaagttaatcatgtccattcctaatgtatcatatcacaaaaaggctttccctgatgctttgtttcatcaattgctcctggcgatggctcatcctgaccatgaaacacgagttggagcacacagcatcttttctttagtacttatgccatctccattttctccccagttagaccaaaaaacaaaggggtatcagaaggtaccaagcgaaagcttctccattcagcatgaaagctttttaggagcagaacagatcaatgggaaacctatggaaggaaaggcagtagttggtgttagtgggaaatatgcagttcatccatatcatggtcacatcttttctggtgctctaactgatggaaaacatgagctaagttcttttcggttaagcagtcaccaagtgagttttttgctttcttcaatctgggttcaagcaacatctttggacagtggccctgcaaattttgaggcaatggctcacacttatagcattgctttattgttcactcgttcaaagacatccagttacatggctttagtaagatgtttccaactggcattttccctcatgagcctctctctggaccaagaaggaggtttacaaccatctcgcaggagatctctttttactatggcatcatacatgcttatattctcagccagggcaggcaatttccccgagctaattcagaaagttaaagcttccctgaccgagacaactgtagatccttttcttgagttgatcgatgatgtcaggctgcaggctgtttctagagaaccggagaacataatttatggatctcaagaagatgatgtgtcagctatgaagacactgtcagcagtaaaattggatgacaagcagttgaaagagactgtaatatcatgcttcttgactaaattttctaaa

SEQ ID NO: 8100 - DNA, 544 bp, Glycine max
  misc_feature (539)..(539): n is a, c, g, or t
ctctctctccatacttccgctctccagggttcgtttcccctcggagccgaaaccctagccgccgccgccgacgaccgcgagcaggctcagatgggaggcaagtgcccgcaccgcaaggtcaaaaagcgccgtctcaactgcaagcaggtgcgccgcggcaagttcctcgtcaaagccgacgacgccgtctacgacgagctcgtcaagctggccgaccagggcaaggattccgagggcaaggcgcttcccgtcgacgaggacctccccggcatgggccagttctactgcctccactgcgatcggtacttcgcggatgagaccgtgaaggaggatcactaccgctcaaagcgccacaagaaaagggtcaagcagttgtctggaccagccccacacacgcaaatagatgccgatctcgctggtggaatgggaatgccggacaacggcttgaagctcatgtcttcctgaactttgtgatcgttgtttgatgttttattgctgttgctatacatctgtaccaactttgcttgatttgtacatgnaatag

SEQ ID NO: 8101 - DNA, 1666 bp, Glycine max
ataagattcggtttatttgtaaagaaagtgacatttagaagaagcaaaaagaagtttattgagattcagaaatggaggtttcagcgctgagtaaaacctaaaaaaaagaaaaaaaatagtgaaaatggaatcgagcgttctggaatgtctgggcatggagataatcggcgtgatgagcccagtctcgatctgcatgttccttgtggtcctgttagtgtattctctctcctcgccgtccaccaccaccactatcgccaccgccgccaacctcgtctacgccgagaacccctccgacaccaccgcccagaagctcgagggcgccgtcctcaacgccgtggtcttcgtcgtcctcatcgcgctcgtcaccttcctcctcgtcctcctctactactacaactgcaccgccttcctcctccactacacccgcttctccgccttcttcgtcctcgccgccatgggcggatccatcctcctctccctcctccagcgcttctccctccccctcgacgccgtcacctccttcctcctcctcttcaacttctccgtcgtcggagtcctctccgtcttcgcctccggcggcctcccgatcctcctccgccagtgctacaccgtctgcctcggcatcatcgtcgccgcgtggttcaccaagctccccgagtggaccacctggacgctcctcgtcgccctcgcgctctacgatctggtcgccgtcctcgcccccggcggcccgctcaagctcctcgtggaattggcgtcgagccgcgacgaggagctcccggcgctcgtctacgaggcacggccgacggtcaatacgcgaaaccacgcggccgcggtagggtttattgtcaccaccgccggggtttcggattcggaaacttccagaattgagcttcaggttgtgtctagggataatgataacaataacaatgagaatgagattaatgatgaaggagaaaggtcacccttggttgggagaaatgaggaggaagaaggggtgaggagggagattggggaaagaggaattaagcttggacttggtgactttgttttctacagtgttcttgttgggagagcttctatgtatgatttgatgaccgtctatgcctgctacctagccattatatcgggccttggctgcacgctcatcttgttgtccgtgtgccgtaaggctctgcctgctcttcccatctcgatcgccttgggggttctcttctatttcttgacaaggcttctcatggagcccttcattgttgggaccgccactaatttgatcatgttttgagagctagggtttaggaatagtctataggcaaggaatttgtgcatggggtcaagaggttatattcttcaagctgttttccttcaatgctttttagttatgctcataagttttatccatttttgaggctaacatatctcttcatgtatgtgggtggtgcctaccagtgatgtgagtttatgtatattatgttcatgtagatgcgcctgaaccgagtgatctgtattttgtacttgaaccataatgcatacctctaaacttcatggttcatgcaataatttataacgtgtatgatgggtacctaagcttgtatttatgcattccttactattagtcctttgcagattatagactaaagctttgtttacgaaaaaaaaaaaaaaaaaa

SEQ ID NO: 8102 - DNA, 798 bp, Glycine max
  misc_feature (735)..(735): n is a, c, g, or t
ctccattccattcgccattcccgtcctcctctcctcctgtcgcctccagagcaacagcagctccagctcgagcaagaaacaagtactagtttgatctgtgaacatgttggccatcttccagaagcaggtggcgcacgcgccgcaggagctcaacagcccgcgcggcagcaccgccaagcccaagaaccccgacgagatcctccgcgacttccacgccgcccacccctccgacgccttctccacctccttcggcggcggcgccgccctcgcctgcgtcgccgcgcagccccgcaacctcgccgccgccggctaccagaggatgttctgcgggctggacgacatctactgcgtcttcatgggcacgctggacaacctgagcgcgctgatgcggcagtacggcctcaccggccgctccaccaacgaggcgctgctggtgatcgaggcctaccgcaccctgcgcgaccggggcccctacccggcggaccaggtggtgaaggacctgttcggctccttcgccttcgtcgtcttcgacaaccgcggcaggtcggggtcgggggcggcggtgttcgcggcgcagagcacggacggcggggtgccgctgcactggggcgtggcggcggacgggtcggtggtgatctgcgacgaccgcggcgtggccaaggccgggtgcgggcggtcgtacgcgccgttcccgcccgggtgcatgttccacagcgagggcgggctcaagagctncgagcaccccatgaaccggctcaaggcgttcccgcgcgtggacagcgagggcgtcatgtgcgg

SEQ ID NO: 8103 - DNA, 482 bp, Glycine max
ccgcctccagaaaaaccctagccctcgcagccgcagcggcgcgcacacctctccctcctccctgaagacagcgccgccgtcggcgagagcacaggatggcgaccgtgcccgctcccgcagccgagaccgcggcctccacggcgcgcacggtgaaggatgtcaacccccacgagttcgtcaaggcctactccgcgcacctcaagcgctccggcaagatggagcttccggagtgggttgacattgtcaagactgcaaggttcaaggagcttccaccttctgatgctgactggtactacatcagggctgcctcgatggcaaggaagatctacctgaggcagggaattgggatcggcggcttccagaagatctacggtggccgtcagaggaatggttcacgcccaccgcacttctgcaagagcagtggtgctgtgtcccgcaacatcctccaggagttgcagaagatgggcatcattgatgtcgac

SEQ ID NO: 8104 - DNA, 518 bp, Glycine max
  misc_feature (461)..(461): n is a, c, g, or t
cccaacccaccccctcccgttcccccgtctccccgccgcctcctcctcctccgcgtcgcaaaccctcgcccaaatccgccgaatcccgcggcccaggaaccaaggtagatcgatggcgaagagctcgttcaagctggagcacccgctcgagaggaggcaggcggaggctacccgcataagggagaagtactctgacagaattcctgtgatcgttgagaaggctgggaagagtgacattcctgacatcgacaagaaaaagtacctggtccctgctgaccttacagttggacagttcgtgtacgttgtccggaagcggatcaagctcagcgctgagaaggcgatcttcatctttgtgaagaacactcttccaccgacagctgccctgatgtctgccatttacgaggagaacaaggacgaggacggcttcctctacatgacctacagcggcgagaacaccttcnggattgctctagatggcgctggctgccacggcaatcgctctgaatgcctcctgtaaa

SEQ ID NO: 8105 - DNA, 667 bp, Glycine max
  misc_feature (573)..(573): n is a, c, g, or t
  misc_feature (662)..(662): n is a, c, g, or t
  misc_feature (667)..(667): n is a, c, g, or t
aaacctctcctagcctttcgtgagaagattcagctgccgtaggcaaacttcccagacgaagatctctgcttttagatatggcaactggtaaaacagtgaaagacgtctctccacatgactttgtcaaggcttacgcttctcatctcaagcgatctggcaagatcgagcttccctcatggacagacattgtgaagaccggtaaattgaaggagcttgccccttatgatcccgattggtattacatcagagctgcatctatggcaaggaaggtatacctgaggggaggtcttggagttggtgctttccgtagaatctatggtggcagcaagagaaacggcagtcgcccacctcacttctgcaaaagcagcggtggcattgcccgtcacatcctccagcagctggagactatgaacattgttgagattgacaccaaaggaggaagaagaatcacttccagtgggcaacgggacttggaccaagttgctggacgtattgctgttgaagtttgaatatctgaaatgttgttgttttgaggctctattacttttccgaaaccaatggtctggttttagnggttggttttttttttttctcaaagaacaaattattatcaatatcattgccgaaaaaaaaaaaaaaaaaagcttatcgatccggtcgancctcn

SEQ ID NO: 8106 - DNA, 539 bp, Glycine max
tcctcagatcagatcgtggaagcccaggccaaatccaaagcgacaacagaaaagctcgagctcttgcttgggtggtcgagcgagcagaccccgatcccagcagtagcaccaggaggaggaagatgtcgtcggtgttcagcggcgatgagaccgcccccttcttcggctttctcggcgccgccgcggctctcgtcttctcatgtatgggggcggcctacgggacggccaagagcggcgtcggcgtggcgtccatgggagtcatgcgcccggagctcgtcatgaagtccatcgtgcccgttgtcatggctggagtgctcggtatctacgggcttattatcgctgtcatcatcagtaccgggatcaaccccaaggccaagccctactacctcttcgacggctacgcccacctctcgtccgggctcgcctgtggccttgccggacttgctgctggcatggccatcggcattgttggtgatgctggagtcagggccaaatgctcagcagcccaaagctgtctgtcggcatgatcctcatcctca

SEQ ID NO: 8107 - DNA, 500 bp, Glycine max
agtatcgccagtcaccaccaacccccaaaagttcttccgctcccgacgaccgccatggccgctcagagcctcctctttgccgccgccgcgcctctcttccaggctcctgcctctgcccgccctttccagtcgctccgaattgtctgcaccccagaaggcgccaccgccgccgccagggcgctcgtcgtcgccgacgccaccaagaaggcagtcgcggtgctcaagggcacctcgcaggtcgagggcgtcgtcacgctcacccaggaagacgacggtcctacgacggtgaacgttcgtatcactggacttgctcctggacttcatggcttccacctccatgagtttggtgacacgactaatggatgcatatcaacaggtccacattttaacccaaacggcctgacacatggtgcaccagaagatgaagtccgtcatgcgggtgacctgggaaacattgttgccaatgctgaaggtgtggcggagacaaccattgtcgatag

SEQ ID NO: 8108 - DNA, 481 bp, Glycine max
ccgccgcgccgccccctcctcccaccctgcctcgtcgcggaacagtgctcccaccgccggcgccatgagtaagttgcagagcgacgccctgagggaggcaatcacaaacattatcaatgactgccgtgagaagaaccgcaagttcgttgaaaccattgagctgcagattggtctgaagaactatgacccgcaaaaggacaagcgtttcagtggttctgttaagcttcctcacatccctcgcccaaagatgagggtttgcatgcttggtgatgcccagcctgttgaagaggcagggaaaatgggcctagactgcatggatgtggaatcccttaagaagatgaacaaaaacaagaagctggtcaagaagcttgcaaagaagtatcatgctttccttgcatctgaggctatcatcaagcagattccccgacttcttggacctggtcttaacaaggcaggaaagttccaactttggtgtctcaca

SEQ ID NO: 8109 - DNA, 509 bp, Glycine max
ataggtatcgccgactagtaagtaacatcaaaaagaatcgacaatggagcaaactttcatcatgatcaagcccgacggcgtccaaaggggtctggtcggtcaaatcatctgcaggttcgagcagaagggtttcactttgaaaggtctaaagctgatcacagtggaccgtccttttgctgagaaacactaccaagacttgtcagccaagcccttcttcagtggtcttgttgattacataatctctggcccagtcgttgcaatgatctgggagggaaagaatgttgtgttgacaggaaggaagatcatcggagcaacgaaccctgcagcatctgagccaggaaccatccgtggggattttgcaattgacattgggaggaacattatccatgggagtgactcggtggagagtgctaacaaggagtgtgcgttgtggttccctgatggacctgtgaactggcagagcagccttcattcttggatctacgaatgattctctatcgttctgtgat

SEQ ID NO: 8110 - DNA, 470 bp, Glycine max
gccacactaatcttccaggtaagggagcgcagcaaaaaatggtgtctctgaagatccagaagcggctcgccgcgtcggtgatgaagtgcgggaagggcaaggtttggctcgatccgaatgaatcctccgacatctccatggccaactctcgacaaaacatcaggaagctggtgaaggatggtttcatcatcaggaagccaaccaagatccactctcgctccagggctcgccgtatgaagatcgccaagatgaagggtcgtcactctggatacggtaagaggaagggtaccagggaagctaggttgccgacgaaggtactgtggatgcgtaggatgcgtgttctcaggcgtctcctgaagaagtacagagagtcgaagaagattgacaagcacatgtaccatgacatgtacatgcgtgtcaagggtaacgtgtttaagaacaagcgtgtcttgatggagagcatccacaag

SEQ ID NO: 8111 - DNA, 1297 bp, Glycine max
ggctcgagcagtcctgagtcccgcttcgtagcccccccccccaaactggaatgctcaggtgatgcctccttacaaaacgcactagagcttgttcttggatatctaaatcaaatcccatcatatggtcatcgagaagttctgatcttatattcggctctcagtacatgtgatcctggtgatctcatggaaaccatccagaaatgcaaaaagagtaaaataaggtgctcagtcattggtcttgcagctgaaatgtttgtgtgcaaacatctctgcgaggaaactggagggacttattctgttgcactagatgagtcccactttaaagagttgatcctagagcatgcccctccacctccagcaatagcagagtattctactgctaatttaattaagatgggtttcccacagcgatcagctgagggttctgtggcaatttgcacatgtcatgaagaggccaagaccggagggggatacacttgtccaagatgcaaagttcgggtctgtgagcttcccactgaatgtcgtgtgtgtggattgacccttatttcttcaccccatttggctaggtcatatcatcatttatttcctatagtgatgtttgatgaggtcactccatcatctcaaaatgattcaaaccacagttttcccaatacttgttttggttgtcaacaaagtcttcttagtcagggaaacaagcctggactttctgttatttgcccaaaatgcaagcaacaattctgcctcgattgtgacatctacgttcatgagagcttacataactgcccaggctgtgagagttccaggcactctaagtctgtaactgcttcccaatgattgccaatcttctgcctgtgacttaaaatttccataaaaatggcgttctacattgtctccttcatattgctatactgcatccacccactggacccatgaataagttccggtgccaagtgactgactaacattatcatctgctcattgatcacaatattttggtgcttgatcagtaaatgctttgcaggacagacaacagaagtgatattacttatacaagggtgagattaaaccaacaacttctgatcattttccttcttttgtttttttgctggaaattaaggcacatgtaaaatgtctccattgtgtttttttcaatcagtgggctgacaccattcttgctggcgataaatattgatcattaaattatttgtatgagatatttacgcgtgttttgcttttaacaatcgcagttgtgaacttctgacttagctaacatatttcattactgtggcaggatcgt

SEQ ID NO: 8112 - DNA, 2183 bp, Glycine max
tagggcctttgaggtctccttgaggagaagggaagaagaagaaggaggaggaccccaccaacctccagcttttaattccatttttcgttgattcttccttccttcttcatttctccccgcgcccgaacaaacgctgcctcctcgtttcttctattttgactttcaaatcgcgtgcacttctactttccttcccttcccttatcgtctctgcaattgtcaatgatcttcagtcttcgctttcccattcgtttttgaactattcctcttttaccttaaaacacacacacaccaaaaatataataaaattaaactaaacaaaattgttctagttttgtagtaccttgtcagctacgtaggccccccccccccccaaaaaccacacctatttccttcaatttagcctcgattcttccgccctttgttcaaaggagaatattctatttatttatttatttattttcttcttctgagtatgaagttatagcgaatttgagtgagtgaatgggttggctcagcagaatttttaaaggctcagaccataataagctttcggaagggcattactataaagaggatgcgggttattacttgccatccacttcgggggtaacaaatgatgcttggaaccagaaccagaaccagaacgagaatgaagatattgatcgtgctattgcgttgtctctggtggaagagagtcggagagcaaacaacaatgtaaatgactacagatcacaattagaagaagatgaacaacttgctagagctatagaacaaagtctaaatttggagtctcctcccagatatggaaacgaaaatatgtatcaaccaccaattcagtatttccccttggggtccaggatttgtgctggctgctatactgagattggttttggacgatatctaaattgcttgaatgcattctggcatcctgaatgcttccgctgccgtgcttgcaacctaccaatctctgattacgagttctccacatctgggaattacccttaccataaatcatgctataaggaaagctaccatccaaaatgtgatgtctgcaagcacttcattccaacaaatcctgctggtcttattgaatatagggcacatccattctggatccagaaatattgccctactcatgaacatgatggtactccacgctgttgcagctgtgagcgaatggagtcacaagaggcaggatatattgctcttaaggatggccggaagctctgcttagagtgtctagattcttctatcatggatactaatgaatgccaaccccttcatgccgatatacaaagattttatgatagcctaaatatgaaactggaccagcaaattccacttctattggttgaaagacaagcactgaatgaagcaagagagggagagaagaatggccactatcacatgccggaaaccagaggactctgcctctcagaggagctcagcactttctcgagacgacctagacttgggacagcaatggacatgagagcgcagccgtacagaccgactacacgctgcgatgtgaccgcaattctcgttttatatggtcttccaaggttgcttactggatcaatcctagctcatgagatgatgcatgcatggctgcggcttaaaggttatcggactctaagtcaagatgttgaagaaggtatctgtcaggttttggctcatatgtggttggaatctgaactttcttctgcatcaggcagcaactttgtatcagcctcatcctcatctgcatcacatacatctagaaaaggtaaaagacctcagtttgagaggaagcttggggagttcttcaagcaccagattgaatcagacatttcccctgtttatggagatgggtttagggcaggtcaaaaagcagtgcgtaaatatggtctacaaaggacccttcaccatatcaggatgacagggacttttccatattaagtacagagattccccatttaacagattgtttctcattctttctagatataaagcctggcctgttactattagagaaaccgaggccaaggtgcttaggcattatagcttcgacgaattggtgattttttgtacttgtaattattgataccgttgcggatatattgattacattcacatttttttttaatgtatcacactgctactttttggcattacaaaaaaaaaaaaaaaaaaaaaaaaaaaaa

SEQ ID NO: 8113 - DNA, 517 bp, Glycine max
  misc_feature (505)..(505): n is a, c, g, or t
ataccccgaaggatcattgttcgctgacgccgcctcctttggtccttcctctcctcccgtcccctcccctccgccgcgatcgaccccaagagcacgaaaccctagccctagcccaacccatcttctccatggccaacagcaacctcccccgccgcatcatcaaggagacgcagcggctgctcagcgagccagctcctggcatcagtgcttcaccatcagaggagaacatgcgctacttcaatgtcatgatccttggcccaactcagtcgccatatgaaggaggagtattcaaacttgagttgtttttacctgaagaatatccaatggctccgccaaaggttcgctttctcacaaaaatttaccatccaaacattgacaagcttgggaggatatgccttgatatcttaaaggacaagtggagtcctgcccttcagatccgaacagttcttttgagcattcaagcactcctcagcgctccaaatcctgacgatccgcttgctgatcnatgtggcaaagc

SEQ ID NO: 8114 - DNA, 531 bp, Glycine max
  misc_feature (498)..(498): n is a, c, g, or t
aatcgaaaattggagccactaaaacatattgccgtccggacaattcttcttcctgtaacacatccatccatttctagctgcaggcagagcagagttgagcgtgtgggagtcgaaggagatcgagatggctactgcatatgctcctccgatggcgagccaggtgatgaagagcggcttggtgagctccaagccgcgggggctgtccggcgcctcactcaccaggaggccccgcttcgtcgtcaaggccgtcaagtctgacaaggggacgtaccaggtggtccagcccatcaacggcgacccgttcatcggcagcctggagacgcccgtcacctccagccccctcgtcgcgtggtacctctccaaccttcccgcgtaccgcaccgccgtcagcccgctcctccgtggcatcgaggtcggcctcgcccacggctacctcctcgtcggcccttcgcgctcaccggcccgctccgcaacacgccaattcacggccaggcgggnaaccctcggcgccatcggcctcgtctccatcct

SEQ ID NO: 8115 - DNA, 5833 bp, Glycine max
ctcgagccgctcgttcccccccggccgctctcagtctctctccggcccacacttgaaaaaaatccccaaaattttgttctctgaacaaaatctcgccgtttcggttcctattctctttctcccaaccaatctctttctctctcatcggttgcgtttccttcgcacgaaatcgctggatttccgctatttctacctcgatcgctcgatctggagcgagacgaagaagaagaagaacccctttccttgataattgggaacacacacagaaacaccgaaactgtgccctaaaaagcaaaacccctctcacttcttccccgatggcggattggaggaggagatctgcgacgccgagcctgatctagggttttcgaatctagggttttgaggaggaggaggaggaggaggaggcgtgccaatttcgatttcgaattgatgtttcttttcagggacgaggctcggatcgactcggaagatggcggattatgcatgggtgcggtcgtgaccagtcgaaacacaatcggcacatgtggcctgtacctgctaacgcgaccactgtagccatcgatccttcaccgtctcaatttaaatgcaaagatggacgcaagattcgcgctggtgattgtgcacttttcaagccacccagggactcccctcctttcattggaataattcgcaagttaacatttgacaaagaagaaagtccgagtttagaagtaaattggctataccgacctgctgatttgaagcttgctaaagggattgtactggaagctgctccaaacgaagttttttactcctttcacaaggatgaaacacctgctgcatccttactccatccgtgtaaagtcgcatttcttcgtaagggtgttgaacttccttcagggatatccgcatttgtctgtcgacgagtatatgacattgagaacaattgtttatggtggctaaccgataaggattaccttaatgaacgacaggaagaagttaaccagctattagacaagacaaaactagaaatgcatggggctgtgcagtcaggaggccgttctccgaagcccttgaatggtccaacatcaacgcagtcattgaaatctggttccgacaacgttcaaaatagttcttcctttggtgcacagggtaaggggaaaaaaagagagcggggtgatcagggttctgattcatctaaaaaggagcggttatttaaggtagaagatggagattctggtcaatttagattggaaagcatgttaaagtctgagattgctaaaataactgataataaaggtgggcttgtggactttgaaggagttgaaagactggtacagcttatgcaacctgatagtggtgataaaaaaatagatttggcagggcggatgatgcttgtcgatgtaattgcacttacggaccggtatgagtgtctatgcgggtttgtacagcacaggggtttgcctgtgttggatgcatgcctgcaggaggtccacaagggcaaaatcagtgatggaaatatgcctaaagaaagtgataagtccattgacgaatttttgttagctttacttcgtgcgttggataagcttcctgtgaaccttcatgcactgcaaacctgtaatgttggaaagtctgttaatcatttacgcacccacaaaaattatgaaattcagaggaaagctaggagtctagtggatacatggaagagacgtgtggaagctgaaatgaatatgaatgattcgaagtctggttcaaaccgtgccatgtcttggccagcaaagccagcaaattctgagtctcctcatgttggaaataggaaaacaggaggaggatcctctgataatgttgcaaagagctcttcaattcaaccctcaatatctaaaaattcccaatctaagttaagttctggagaagcattgtccaagtcctcttcatctcctggctcaactaagtcaatgactacctcagcgagtggtaactcaaaagatcaaaacagtaaagtcttggttggagccgcagcgtcagatctgcctctgacacctatcaaggaggagaggagcagcagttctagtcaatctcaaaataacagtgtctcttgttctagtgaacatgctaaagctattggttcttgcagggaagatgcgaagagctccactgcagtgtcaacgagtgtgggcaaaattcctggtggtgtgtctcgaactcgcaaatcaagcaatggtctacatggggctggtgttgcagtaggtccgaaggagcacagctctgcaaaaaattcagctaagaattcacctgctgaaaaagtttcaccaactcgagtctcccatgaaaaatcagccgaccagccccttactgatcaagggaataatcagcgattaattctcaggttgccaaacactggtcgtagtccttcaaggggagctagcggtggctcatttgaagaaccaggtatcatgtgcagcaaagcttcgcctcctgccgacaggaatgagaaccaggacagaagagtgaaaactaaaaccgagtgtttgctgacccatgtgtcaaatatgatgaatgaagcatgcgatgctagtgaagctttgcttggtgttgacgaaggtaagggccctccaatgttcgatgagcgatgcagggctaatgaagatggtgataaggtagaagaaacatcaaaaccaactagtttgtcatctggatttgtttccagatcagggcagacttatgatttaagctccatgaatgcattagttgaaagctgtgtgaagatttctgaagcaagtgcatctgcgtcccatggagatgatggaatgaacctactagctactgtggctgcaggggaaatatcaagatctgaaaatgcctcacccatgtcatcccctgagagaaagtctcttcctgcagatgaattgagctcagccaatgatttcaagttaaaacattctgttcgtgccgctggttgcactgtttcacagttggatggtggggctattgcagagcatcctttgaatacagttgattcattgcagataaaaaatgatttgaggcatcctgctacgacttcaggagatggtgaagccatttcatcgagttgtgtagagaaaagtggtgatggtagatctcagataaatagctcccctacagatttcttacaaaatgctgaaggtccatgcttacggcctgaaatcaaagaggatacttctgaaactatattgccagataaaaaggagactaatgtagacctcggaggttctgactctaaattaaagtcatgcacttcctctattgatgatgatcagaaggttgatcacatgaatgagggaaccattgagaatgaggaattgttggttccaaaagctgttgcaagtgttaagtctgaaaatgaatcaggtgaaaagcaagctgagttatcctcaggcgtggataatgagaaccagatttgttcagaaaaagcaacaggtactggtatactagtgcaaaaggcctctccaattgcagaaaactgtgagtccttatatttaaaaaaggagtcacctacttctggtaatgctgtaatggtatctagggatgaaaatgctgatgacatgaagtcagttgtgattgagcctgatgaacgaagaatggagcaggatttatcagtttcagatgatgttaatgaatgtgctgaagatactatgggcagaaatgaggctataggtcagtgttctggctcatcagttcagccagatttaccaacaatgcctaggaaagagaatgatgtgtttaaagcatgtgagcgaaagttggatgcaaatcaatctgaggttgcaggagagaggcatgcaggttctgctgctgggtctgatactgctgtaaaactcgactttgatttaaatgaaggctttcctgttgatgatgtaagccaaggggagattgctaggcaggaagatcctatcacatcatctgcagttcatgttccttgcctattgccttttcctatttcgtccatctctgggggcttccatgcttcaattacagtggcatctgctgcaaaggggcctgttgttccacctgaaaacccattgcggattaagggggagcttggttggaaagggtcagccgctaccagtgcatttcggccagctgaacctaggaaaaatgctgagacagcatccactactaatgatattgcttctgttgacggcacttctatcaaacaaggtcgccctcccttagattttgacttaaatgtggcagatgaaagatgttttgaggatgttggtttgcgtggttctttagaagctggaccacttgatcgtagcactgggggatttgatcttgatttaaataaagttgacgagactcctgaaattggcactttctcgctaagcaaactggaaattccttctttacctagtaagccttcgttgtccagtgggttatctaatggtggaagtgtctcaagagactttgacttaaataacgggccaggccttgatgaagttggcagtgaagtccctgcacgtagtcagcagatgaaaagtactgtaccattcccaactgctgtccatagcacacgaacaaacaatgctgaatttgggaattattctgcatggtttcctccaggcaattcttattctgcaattactgtcccaccacttctgtctggtagaggggagcagagttatgttgctggtgctggggcacaacggataatgggtcctacaggtagtgctccttttggtcctgaaatctacagaggaccagtgctttcatcctctccagccgttgcttatccacctactacgccttttccctatccaggatttccatttgaaaccaattttccattatcttcaaactccttttctggttgttcaacggcatttatggattcatctactgtgggtggattatgctttcctaccatgccctcacagccagttgggcctggtggtgttgtttcatccacatatccccgtccatatgttatgagtcttccaggtggtacaagtaatgtgattcctgacagcagaaaatgggcaagtcaaagtctggatcttaattcgggccctggtggtatggatacagaacggagagatgatagattgccttcaggattgaggcaaatgtctgtccccaattcacaagcctcgatggaggaccacttgaagatgtttcagatggctggtgcattgaaaagaaaagaacctgatggtggttgggagggagccgagagattcggttacaaacaaacttcatggcagtagtgccatggctcttcaacgcaaatattcaagagctattttggaaaatgtcagaaaaattggggatattattttgagtgttgagccatggacaacaagcaaagatgctacccttgttgctgatgtgcctcttcagttctgacttgataaagcgatcagggcctctgatgcagttgttttgtatgaatctgctcccagattgtcgcttgcagataaatgtttttcctgtgtagatatctaactgaaaacagcaggtgtgataatgccgcctagaatcagagaaattggcatcaagtgtttgactgtgactgttctgcaacagcaccgagcccaatccgctctcgagcatttggaaggagaggattggatgtatgaactggctaagcttgaggctagtttgtcttctttaaatcattttttttcaacttttgttacatatatagttattgctgtagtcttgactttggaattttgtcacttatcacattctggctattgatatatgcacaggttagcctccatggccaatgtgtcacttctctcccctattgttatcgccttgcacttgcaacattttctttttggtatcacaactggatttggtttgt

SEQ ID NO: 8116 - DNA, 1746 bp, Glycine max
  misc_feature (12)..(12): n is a, c, g, or t
ctagtctcgagnttttttttttttttttttttttttttttttgactgacccgaacaacactcatcatttgaactcaaatgagaaaacagcagaatatacagaggaaaacgagttatagattcaggcacgccaaatatgtacgattattgggcagaaaatgaaaaacacgacttgtaggcaacttaacgtgctttttcagtacacgtggatatcaacactaatttctcccaagtgattagccctgattgagcaactgctttccctgctgctcagtttctccgtagaaatcttctggtcggtagtaccatatcgcagccaaaggcatgatattctcgccagtgctgcctgtccagcaactcgtacacggtatacaacacttaaatctgcccatatttcacttgccatggctcctgattgactacttgggttgtaaccttctagatctgactctgttaccatgactacagaattgtcatcaaacatcacaagatctcgtgaacctgctgccacctgagaagtttttacaaatagattggctgtaggagcacatccaacggtcctcctcaccataagatggtagtagtattcttggacagcttgccactgagaggaagctagaagcacccttggtcgaattgatttcacataagaatatgcagcatcaggtgtcatcattttgtggtgcaccagataacaaataacaatagtcgtgctacgaccacgtccagctttgcaatggacatatgtagttcgtccagacaatgcattttcatgtatgaaatccacagcacggaaaatgtcattcaatgaaggagcaaaacagtaatctctagtaggaatcaccagatgatcaattccatgagcataatataatgtcgttggaaccaaagtctcatatgattcattcaatgtgatgaccccacggacaccaagctcctttaagcggggaacatcaataggaaatggaacagcacctaacaatatgaactcatcaaccttatcccaccatcgaaactcggcctgaatcttattcctaacgacattgtaaaacagggttggatagaaaagcgcacgagcgcctgctccaaccagcacccttttcgcatcataacccacaaacctcgatcctccttcctccccaccttctaccacctcacctcccttcaattcctctatatgcataactaactttcaaatcgcaaaacaattacagtaataatatccagatatttacaaaaaccctaatcaacaaattacctatcgtatgaaccacacttttttttacaacctacaacccctcgcgtatactatccacgaagctatcacaatttacaaccaccaaaacaatcacaagaaaatatttacagaacaaacgggaaaacaaaaattaaaatctaattaccccaaattgaaattggcggatcaatagatcgatcgagaaaacctaggaaattggaattctgggggggggggggcctacgttgctgatataggacagaaggttggccgagaaaactgggaggagaattttcccgggaaaataaacccatgtttctttcggaaaagggtagatcgaggaaaagtgattatcgtaatctgcaagagagagaaagagagagagggaaaatttgtcggaggaaggaaaagaataggaagagagagagagagagagaggaagttggtaaattgaatccctaaccctagatttggtagaatcagaaaatggctctttcgcccgacgcgcgg

SEQ ID NO: 8117 - DNA, 881 bp, Glycine max
acgaggattcttctcgtttaaatgagcaatcaaaggctggccttgtacctgttaaagccttcggccttgccaaaggggaaggaaaaaaggattttggcaagcaaaaatcttcttgaagtaaggagtcgagtccgtgaatatcgagcaggagatacttctcatcctgaaaatgataagatatatgccctgcttagaggtttaaagtcacaaatgaaagaagctggctatgttccggagacaaaatttgtgttgcatgacatagatcaggaaggcaaagaagaagctcttcttgcccacagtgagagacttgctgttgcttatggtctccttaacagccctgctcgtgctccgatgagggtaattaagaacctccgtgtttgtggtgattgccatacagcactgaagattatttctaagcttgtaggcagagaactcattattcgagatgcgaaaaggttccaccattttaaggatggactatgctcctgccgggattattggtgaacatgaacttagatgtatcctgattcactaccagatggattgaatagaatggctgttggtaggtaacccctgaagcctgcagatagggaaactgttcatatatctcacggtcattaaattaaaatcgatctttatatccgcgaggagattggaattttgtttaaccaggctcttccactctaataatcaagcagtgggatgtgcattcaggttgcagaggcgttattcattgagtagttttatataattggttgttttagcttccatataagatataaattattattgccactccaggcaagggaaaaacttatgtaattgatagacaacattgaaattcaatggtataaacttgtttgtcttgcagtcttgcttat

SEQ ID NO: 8118 - DNA, 618 bp, Glycine max
cggctgcgagaagacgacagaagagcacgagacgatgtttatataatcaatctgtcaaaaccagttgtgtgtattgtttctgccaggcaaatatcaatagcaatagcagcaatgtcaatgttgagatcagtttgtcagttaagggtgggagtcacaacccaaaaaccttgcctccatccctcaatcttattctccttttccctctctcacaacactcacactctcactctcacatctttccccagaaccttccgtttccacccaccttcactgcctctttcaccctttgtgcccttcatgcctcccaaagcaacagcttcgtatggcactggggctagtgctgctgctgaaggtgataggccaagggagatattggtgcagcatttgttggtcaaagaagatgaccagaagcttctgttagatattcagcaaagaatctcttcaggtgaagatttgagtgatcttgctgtggaatattcactgtgcccatccaaagaagaaggagggatgcttgggtgggtcagaaagggacaaatggttcctgaatttgaggaggctgcatttactgcacctttaaacaaagtggtaagttgcaaaacgaaatttggatggcacctg

SEQ ID NO: 8119 - DNA, 1393 bp, Glycine max
attttttcggtgtttgctttagaaggggagagtttggtctacacacaccaccacatgaagagcatggtgacgccattgacgagggtcttaccctttcgtcacccaaatggccataatacccttccattttctcttacacgctacccttcttcaccaaacttctccttctcccctctcactctcactctttccatggctgcttcaccccaatcctccgctccaactgtgtcgcctggtgatgttaacatcgacaaagatggtgtatttcaattgattcaagctcatcaggaaaaagctgctagacttccaccagttgaggagattcgaactgtccttgatcgtagcgtgcgcgggatgctctctacattctcaaagaagtttgatggttatccatcagggtctatggttgactttgcatgtgattcaaatggatatcctatattagcagtgagcgacttggcagttcattcaaaggacctaactgccaatcctaaatgttcattgcttgtggctagagatcctgaagataggactgatttagtgattactgtacatggtgatgctatctctgttcctgaaaatgaaagagaagccgttcgagctgcatatttggcgaggcatcccaatgcattttgggttgactttggagacttccaattcttgcgcattgaaccgaaagttgtacgatttgtgtcaggtgttgccacagctttgttaggatcaggagagtttagtggagatgagtataaatctgcaaaagttgatcccatagctcagttttccaagccagtggcgtctcatatgaacaaagatcatgctgaagataacaaagtgattgtgcagcattggacctcagttccagtggactttgccttcatactagatttggatagtcttggtttcaatgttaaggctggttatcagggtgatactttcaagcttcgtgtacctttccctcgatgtgcagaagatagaaaggatgtgaagactctcattgttgagatgcttcaagctgctaggcctaaagttgattgatcacttcacagatcaatgatgaacagcacctgccatccttcttggggagaggacaaaatgtatacgtcaaaaaagtaaatgcagttataatttccaaagataaagatgacaaagcaaatggttgactttcctaatttcttgttcactctatttgggattttcaagagggaaagcacttgaatattctagcatacagcacaagtggtgtgatactttatctaagaaacaaacccttcatacataaatggttttattatgtatttcttcaggtgtgagttgaaacaatgtatggatggataataattaattatttttggtacttgcaatagcaaactctgagctagatgttgtgccctcc

SEQ ID NO: 8120 - DNA, 1294 bp, Glycine max
gttggtattcgcggctgccacgagaggcccccatacacacaacacaacaccaacatgaagagcatggtgacgccattgacgagggtcttaccctttcgtcacccaaatggctataatacccttcccttctctcttacacgctacccttcctcaccgaacttctccttctccttctcccctctcactctcactctttccatggccgcttcaccacaatcctccgctccgactgtgtcgcctggtgatgctaacatcaacaaagatggtgtatttcaattgattcaagcacatcaggaaaaagctgctagacttccaccagttgaggaaattcgaactgtccttgatcgtagcgtgcgtgggatgctctctacattctcgaagaagttcgatggttatccatcagggtctatggttgactttgcttgtgattcaaatggatatcctatattagcagtgagcgacttggcagttcattcgaaggacctaactgccaatcctaaatgttcattgcttgtggctagagatcctgaagataggactgatttagtgattactgtacatggtgatgctatctctgttcctgaaaatgaaagagaagccgttcgagctgcatatttggcgaggcatcccaatgcattttgggttgactttggagacttccaattcttgcgcattgaaccgaaagttgtacgatttgtgtcaggtgttgccacagctttgttaggatcaggagagtttagtggagatgagtataaatctgcaaaagttgatcccatagctcagttttccaagccagtggcgtctcatatgaacaaagatcatgctgaagataacaaagtgattgtgcagcattggacctcagttccagtggactttgccttcatactagatttggatagtcttggtttcaatgttaaggctggttatcagggtgatactttcaagcttcgtgtacctttccctcgatgtgcagaagatagaaaggatgtgaagactctcattgttgagatgcttcaagctgctaggcctaaagttgattgatcacttcacagatcaatgatgaacaggtgctcctagaatcttcatataatccatcaattcaattcatgtgtttcagcctccaagatttgtcattttttcttcattctgagattagttggctatgccttgcaactagatattcatataccacataattattaacactatttatgccaaataaatacttgcatacgtattggtaacatttttgtctgctacttttaaaccaacttacaaatctttggtaatcctt

SEQ ID NO: 8121 - DNA, 1158 bp, Glycine max
ttccacgcttccgttgaaagccaatctaactgaactggaatcacgtcatagcaataattatactgaggaagagttacattctgtaaaaaagtcatctaaaaagttacctcccatacaagaagcaccaaagagttatactccatatatcaagtacaccaagcttcaatttaaggttgatacattctttgccgttggatcccctcttggtgtatttcttgcacttcgtaatatccgaattggcattggtagaggccaagaatattgggagcaggaaaatataagagaggagatgccggcttgtcggcagatgttcaacatttttcacccctatgatcccgtagcatacaggatagagccacttgtgtgcaaagaatacatcagccaacggcctgttttgattccatatcacagaggaggaaaaaggttgcatattggatttcaggaatttactgaagacctagcagttcgaactcatgcaataaagaattatatgaaatctgcaagggataaggtaatcacagtgtgtcagtcgaggaaaatggagaacatagaaggggagagttctgaagaggaagaacagccatcatatggatcttttatgatggagaggttgacaggaagcatgagtggacgaattgatcacatgcttcaggacaagacctttgagcatccatatctgcaagccattggagctcatacaaactattggcgggattatgatactgctcttttcatattgaaacacttgtatggagaaataccagaagattctgatttgttggttggatttactggggacaactcaaaatctgagagtacctctgttagttggtatgaaccgagagacacggttgaggaagatcttccgttgactttctcagacaaggttatggccagaagcttctcgagcaaagctaagaaggttctgcagaagcacactgcgtttaatttctaaatgcctatacacgatgtaatcgagagattgtgtaatctacggaagaatgtatagtagaagaagggttccccatcttaggattgtttcatatagttcgctagtgtacaattagaccctcctccaatgtacataaccaggggtgttaaagaaaaaacatcttttagtatcaatatatgagaaccgcatagtacctggtgttggcg

SEQ ID NO: 8122 - DNA, 1652 bp, Glycine max
tcagctacgtaggccccccccccatttttttcatatacaacaaacacggattcattgcatcaccgtcaccaccactttcatcatcataaaacatttttcatataaataaaatatattcattcattcacacatcgtaataatcattatctatcattctctctctttcaattttagacagaagactaaaagagtgaagagaacaaacagagcaatggaaggaggaggagctgctccgccggccgacaccgtgatgtccgacgcggcgcctccgccgcagcaagcgatggctatggggatcgagaatattccggcgacgctgagccacggtggcaggttcatccaatacaacatattcggaaacatattcgaagtcaccgccaaatacaagccacccatcatgcccatcggaaaaggcgcatacggcatcgtttgctcggctttgaactcggagacgaatgagcacgttgccatcaagaagattgcgaatgcgtttgataacaagattgatgcaaagaggaccctccgtgaaatcaagctgcttcgtcacatggatcatgaaaacgtggttgcaatcagggatatagtgccaccacctcaaagggagatattcaatgatgtttacattgcatatgagttgatggacactgaccttcaccaaattattcgttcaaaccaaggattatcagaggagcactgtcagtattttctgtatcaaatcctccgtgggttgaagtacatacattctgccaatgttctgcatagggacttaaaacctagcaaccttctcctgaatgccaactgtgacttaaaaatttgtgattttggactggctcgtgtcacgtctgaaactgattttatgactgaatatgttgttacaagatggtaccgtgcaccagagcttctgttgaactcttctgattacactgcagcaattgatgtatggtctgttggttgtattttcatggaactgatggatcgcaagcctttgtttcctggcagagatcatgtgcatcagttgcgtctacttatggagctgattggcaccccatcagaggctgatttggggttcctgaatgaaaatgctaagagatacattaggcaactacccctttaccgccgtcaatctttccaggaaaagtttccacatgtccatcctgaagctatagatcttgttgaaaaaatgttaacttttgatcctagaaaaaggattactgttgaagatgcactggcgcacccgtacttgacatctctgcatgacatcagtgatgaaccagtgtgcatgactcccttcaactttgactttgaacaacatgctttgacggaggaacagatgaaagaactgatataccgagaggctctagcatttaaccctgagtatcagcagtagtagtgatagtcttgttgtcattggatttggatcgtgtgatgtttgtgtccatagatcaagggatttcattgtgtatatatatctatcatctgaaaccagatgatcttggagttgaattatttccatcagagacatgattggtagactggaacaatcgtaaggtatttgtattggcttatttgcttcatattattattgtccaattcattggctccagccaactgataaatcttttcttggtctcaacaaaaaaaaaaaaaaaaaa

SEQ ID NO: 8123 - DNA, 1858 bp, Glycine max
ccacgcgtccgctccgaacgcgtttctcgcatgactcccgaaatgcggctcgaggaaatccggtccaggcttaatcttgatgttgctgtcgcatctgactctcctcctgcacctgcgcctgctccaatagaatcgtttactgatatgtgtttgcatccgagtatcatgaaggacattgcttaccatgaatacaccaggccaacttcgatccaggcacaggccatgccaattgctctcagtggaagggatctattgggttgtgctgaaactggtagcggaaagactgcagctttcacaattcctatgatacagcattgcctggcccaacctccaattcggcgcaatgatggtcccctggcattcgtttcggctcctaccagacgtaggcccccccccccagaaaaagaggttaaagcttttagcagatctctcgagtcattaaaaactgccatagttgtgggcggaactaacattgaaaagcagaggtttgaactaagagcgggagttgaaatagctgtggccacccctggaagattcattgatcacttacaacaaggcaacacttccctctctagaatttcttttgttgttctggacgaggcagatagaatgcttgatatgggttttgaaccacagataagggaggtaatgagaaatcttccagagaagcatcaaacactgctgtttagtgcgactatgcctgtggagattgaagaattatcaaaggagtacttggctaacccagtgcaagtgaaggtggggaaagtgagtagcccaacaactaatgtttcacaaactcttgtgaaaatttctgaaaatgagaagattgatcggcttctagatttgcttgtagaggaggcatcacaggctgaaaaatgtggtcatccatttccattaacaattgtgtttgttgagaggaagacaaggtgtgatgaagttgctgaagcgttggtagctcaaggattatctgcagtttctcttcatggtggtcgcagtcagagtgaaagagaagctgccttgcatgattttcggagtggcaccaccaacattttggttgccactgatgtcgcgtctcgtggcttggatgtcacaggagtgtcacatgtcattaatctagatcttccaaagaccatggaagattatgtacaccggattggaaggacagggcgtgcgggatcaactggcttagctacttcattttacactgatcgcgacatgttcctcgtggcaaatataaggaaagcaatagctgatgcagaatctgggaacacactgacatttgcaaccggaaaggttgctagaaggaaggagaaagaagcagcagctgcacaaaaagaggcaaatattgctttatccaaacagttaggattgggagctgcttcaatgaacattgaagataaatataaattcatgattactgccacaaacactaaaaaagagggagcagcagatagtgcctgggatgattaacgaagtatttggttcttcccatatttgattggtgacaactgctaaagccttttaagtgctggtgcataattgatattgagtgcatttataggtttgttgcttttaagacgctggagatggagaagtttcttgttaagtttccaagtctacgtattgtttcacaccgttgtaaccaactagcttgctagacgcctaggtgctttgtagagttgtcatgcaggtagtgcatcttatgtaatcatagaagtgcaagttttttttaaatttgtgttacgccgaatataccactgttcgcacaaatatttcatcatcattaaatgtatatatccagcttgctgcatttcacaaaaaaaaaaaaaaagggcggccgctcgcgatctagaactag

SEQ ID NO: 8124 - DNA, 763 bp, Glycine max
tcgggattcttctctgtttcactccctccctgccacccaatcttcacgagcaaccatgttgtcctagcaatgaccttcttccgttcagcccacccagccccccccctcccgaaacacacttaattctccacgcctccttgcaatggctgactcggatctctcttcaagtcaaatttctacacattctactgattcaggaaatcgagggtcttccaaagttgaattttctgaagatgaggaaaccctcatcatcaggatgtataaactggtaggggagaggtggtctataattgctggaaggattcctggaagaacagcagaggaaatagagaagtattggacttcaagattctcgggctctagtgaatgaagctccggagtactacgattggtgttcagtctaggacgagcaagaagattttgggtgcaagattagtgtgattttgtgggacataaaaactgaattaaagttggcatagtttataggtatttgtattggctataaaaaaagaagtggggcagcaactatagaagctggtttgtgttatatttctccatcttgaaatgttccttggtgtgatattttccatcttgaaatgttccttggtgattggtcttttctgaattgtacttagtgctgttcatcttcgtgtatcttattcatttaccattttggctttttatcttgcgtctgaaatctgtattggaaatgagaattaattagagacaggttcagtattgtcattcttagtttaattacgta

SEQ ID NO: 8125 - DNA, 1750 bp, Glycine max
ggtacgtttggtgtttcttctagagcagcagttcctagcctttttggccccagggactggttttgtggaagacaatttttccatggactgggggtgggggtggtttcaggatgaaaccattccacctcagatcatcaggcattagttagattctcataatgagcgcacaatctggatccctcgcatgcgcagttcacagtagggttcatgcttctgtgagaatctgatgccactgctgatctgacaggaggcggagctcagccggtaatgctcactcacctgccactcacctcctgctgtgtggcctggttcctaacaggccagaactggtactagtctgcggccgggccagggcggggtggggagtggttggggacccctgttttagagtatgttctgaggcttggatgcaactttatattttttcaatactcaattgtcccaacattatttgtttaaaagtttatatttttcccatagtatcataacccctactttatcatttactaagttcctataggtctgggagtctatttctggactctatgtttttccatgggttgatctgttgttaatgtttgaaatttatatcatcttttcatatctgaaaagactagttctccctcgttgctcttccccttcagccccccccccccctttttttttttttttttttttttttttttttttttttttttctgtaacaatcaatcagtaaacattcataaattactctaatctatactagtgtaatgtattcaagttcacaggcaaaacttcacttttacagagatgctcttacacccacaactttggtttgaacttaacaaatagctgaattgaatgaaccgaagcaacttcctcacaatacctcatcctcatcatacttgatctaagggaaattatagaaaactctatgggaacagaaaaatgatcctgttttgtaattgattagaagagatcaaaacctttctgccaatctggcagtaactgctctaagttttgaatacacctttcctgcgggtgatcccaggatcaggctacagagagagtccctggcaatctttatgttggcaaaagatcccaatatgtgaattttggtgtcagcaatcacaatccttgtctttgatgcattctcaattgcgaactttgttttaccacctttaccagataaccttccaatagcacgagacaagtgatcgcctcgaagagttttaacatccttgatctcaaaggactcgatgtagagctcatccaaacgcaaaagagcaatggcatctatgacatcaaaacccagcatgaaagcatggacaaaatcagcacatttttgcaggttactaatatcaggtgtatcaggccttgtcttcagctccactctacgagccttcaaattcatacgaacatcaattttcatctgttcatatatgggagtatagatatccatccaagctttcttgagaggggtataacgatgaggtggaacattcaccttgcggaactgtacctgaccatcagacatctcatgaggcttcaaaggctcaaactttggctttggtggcaaaagtttggcttcagatgggacagtctcaacttccatagaagaagctgcctgatttgactccattctgcaacacgtagccggagaaactgatggtggccaatgctgcggcgatgacggcgaggagagggtttgacgcagtttcactctcagggttttcagtaatgtgggggggggggcctacgtagctga

SEQ ID NO: 8126 - DNA, 1062 bp, Glycine max
gcagccgcaggaatttttttttttttttttttttttttaacaatcaaacagtaaatattcataaataactctaatctacactaatgtattcatgttcacgagcaaaacttcacttacacatctatgcttacactcacaacattgatttgaacttgaagcaacttcccacaagaactcatcctcatcatacttgatctcacagaaatcattaaaaaatctatgcgaacaaaaaaaatgatcttgtaatgtcatgattatgcgaagatcaaaacctttctgccaatctagcagtaactgcccttagttttgaatacacctttcctgctggtgatcctagaatcaggctacaaagagaatctctggcaatctttatgttggcaaaagatcccaatatgtgaattttgggggcagcaatcacgattcttgtcttcgacgcattctcaattgcaaactttgttttaccaccccttaccagacaaccttccaatagcacgagacaagtgatctcctcgaagtgttttaacatccttgatctcaaaggactcaatgtagagctcatccaaacgcagaagagcaatggcatctatgacatcaaaacccaacatgaaagcatggacaaaatcagcacatttttgcaggttactaatatcaggtgtatcaggccttgtcttcagctccactctacgagccttcaaattcatacggacatcaattttcatctgttcatatatgggactatagatatccatccaagctttcttgagaggggtataacgatgaggtggaacattcaccttgcggaactgtacctgaccatcagacatctcatgaggcttcaaaggctcaaactttggctttggtggcaaaagtttggcttcagatgggacagtctcaacttccatggaagaagctgcctgatttgactccattctgcaagtgaagaaagagacggttacgatggcgccgatggaagcggtgtgcggtggcggcggcggcggcggcgcgagaagacgagtcgagagtgagagatgaggttaagaatgaaaactgaagattgtgtct

SEQ ID NO: 8127 - DNA, 1027 bp, Glycine max
acttgcaaacactgttgaaagatattgataaagcccgtccaattggggaggcttgtaatatattccaccagttatgtatgaagcctgctggaggaatgcagaattgtttgaaccaatataacaagaatctataggaactgtagagtgctgtgcagagaaaattgcattcatgattgccacatactgttctggtccatcagcaaccccttgcaaacataaaatccgaggctgaggaggcattggtcccgaacgaaaagctctctgtatataacaaagcgccatggacaaggagcctgataacagcgaagaaggaacggttcccggtgcgtgagccgcgtcggcatctaattggcggtccctagcgagaaactcatcgagattgtgaagtaaattggaataaagcgcgggcattgtaccggtggtggagccatggttcttatcggaagtggaatcgtaaatgtagccgcaagagttgcatccggtggcgatgacgatcacctggttgagctggccaaggagcaagatcgagttgagaaaagcgagtacttgggagaggaactcggcgaaggggaaggggaaagtgctccagaagaaagggttggtgtctagcgttacaacgaggaggctcacgtcatctgcgtagagtttggaagaagcagaaggcatggtgtgtgtgctgtgtcttctgctttcacttccaactcatttcttggcagctcaacgatgcaattaacacttcccgggattttaggcccaagttcttttccaattgaagtttgccttctgttaacagttcagtgcccaaattgaagatggaaatgcttgttagaagcactcgtagtggctaacaggtgtgtccggttaaaggggaagaatgccttgcgggtaacatagcacgttgacaaatgaggacgtgactaacacctgggatgcatttgttttaatgaacacacattttcatgcatattttttaagaaataaaaattcataacttttaatacaacgaatcatttggggttctcccaac

SEQ ID NO: 8128 - DNA, 2560 bp, Glycine max
  misc_feature (4)..(4): n is a, c, g, or t
tttngagaagaggtgagagagaaagtatgtgggagcttagtggacattaaatggaaggagcccttccttttccggcactttcttttgctttcagtccccacttcggtccggaattcccgcgtcgacccacgcgtccgttccctttttattaacacttcacaaaacaaactctctcatctcctcacacttcaaatccaaatatctctgttctcaatattccacccccttttctcttctctcttctttctctattctcagatccattgctttatcccacagcttccaccactgcatccaaacacgcccttctctcatctagatagaatttgctcttgcaaaaatggcagcttctggggttcattctagcaagcaaatgaggaggttggaatcgaggaagtcacattcttggtggtgggatagtcacatcagccccaagaattctaagtggctttcagaaaaccttgaagagatggaccggagtgtgaagcgaatgttgaagctgatagaagaggatgcagattcatttgccaaaaaagctgaaatgtattatcagaagaggccagaattggttgctctggttgaggagttttaccgtgtttaccgggctctggctgaacgttatgatcatgtgacaggagaattacggaagaatataccctctgatctccaatcccaaggttcaggtatttcagatgctggctctgaaccatcctccacttggccctctccaactccaaagagggggggtcgtcttaaatctagtacccgagctgctgggtttgaatactttcttggctctagtgggaatgggactgatgtataccaaaaagatggggatgagtcttctactttgacagattctgaggaggaatctgatgattcatcagttaacaattattcaggtttctcacggaatggtagtgatctagggataaacagaagaataatggagttggaaactgagctccgtgaggtaaaagaaaagctatggatgcaggaagaggaacatgcagatggttcaactaggggatcaagaaatgagaatactgaagatctttataccaaaattaatgcatatgaacaagaactaatgactgtgaatgagaagttaagactttcagaagaagaaattactaaacagaagattgagcttcaaaaatacagactcttcaatacagaaaatttggaggctggttttgagtcatcattaacgaaaaaacacatcaatgaacctgcggaagccctggaacacaagacgatagaggttgagggaagcattgatggtgtggataaggaattgtttgaccaaaatggtgagatcgagacgcttgcgagggagctaagaattaccaaagaaaatctcaaagcttcggaaatgcaaattacttcactgaaatttgaggccaataaatcatctgaaagaattcagcaattacatgatcagcttgagttggctcgtaaagacatttctacttggaaaaccaaattcaatagtgagaaaagagagagcaccaaactccatgaaagacttgcgaggttaaggactagtctatcagatcgtgaccatgagatcagggatttgaaaacagaagtatctgatgccgagcagaaaatcttcccagagaaagctcagttgaaatctgaaatgtcaaaggtgctggaggaacggactcatttagaggaacagatcagagaatgggaaagtcgaggccgttgttttgaagacgatatcagaaggatccagtctgaaaaaatggagatggaggaggcactcaagggtgagattcagctgttaaaggcaggaattgagcagagagagaacaacataaaagaactcaacacaagcattgatactttaaaactagagaaagataatctccacgtagaagttggttcactcaaggaagaggtgaactccagagatggtaggattgaacacctgaacagccatttgaacgagcttcacgtggaacatgtacaactgattgctggaatggaggaggcacacaaacatgtggaagaactaaaatcaaaagccaagcaacttgaggaagaggtcgagaggcaaagaaccgtgatcttagaaggagcagaagagaaacgcgaggccataaggcagctatgtttctcactcgagcactatagagatggctataatatgcttcggcagcatgttatggggcacagacgagttccagttttggctgcctagttaataaatttgaaacgtgatcttgtatattgttttggtgctatcttcatttctgtcttgggatgttttatggttctagtgtatgagtcaaggtcatgtgtactactacggagaagtgatgaccatgtttgcatggtgtaagttatactctggcttgttagctatacgcctaataccacaatatgctgctgatgccattgctaagataacccttccttaagggctcaagagagattgaaaaatttgcttagtttgatctaatattgtataaccgactcgtctggtctgatgtcaatgattgtgcaacttctttttttaagttattgcaacttggatttcccttacagt

SEQ ID NO: 8129 - DNA, 736 bp, Glycine max
tgtggatgtagtagtatttatcaggcaagtgggggttggtttgtgtttttttgttatatttgtatgttgttctgtgctgggtccttaatttgtggctgagaattaattattattattatcaattatgggtctctcaaatttcccaagtgcatctgaaggggtgctacctgtgcttgtgataaacacggttctctcagtggcagtgttgaagaacatgtttagatccatgctccaagtagtacttggtggcagtgctgctgctaatggttcaaacattgaacatgatgaaagttcatcatcatcatgggaaaggagggtgtcaataactcagtacaagtcattgtgccacagccacgacataggaggaacaagtatggctatggtggagtgctgcgtttgtttgtgtcgttttgaagccaatcaagaggtcagtgagttgccttgcaagcattacttccacagaggttgcttggacaaatggtttgataacaaacacaccacttgtcccttgtgccgttccatcgactagacatgcagacatatacatacaaaggttgattaattaccattagagatatagctagctagttaattagttgttgctatatactgttaactggttatagtgaaaagaatcaatgcctcttttcatttctttactttagatttgtaaaactccttcaaccaactcagtttctctttgttttagtttttatggaacgtaagagagatgacg

SEQ ID NO: 8130 - DNA, 1581 bp, Glycine max
tttacgcgtgggcggacgcgtgggcggtcgcgtgggcttcaaccccaaatccaagtctttcatgagtgactcagtgggaagagccagtgcagaaacaacttcagagttctactttgccataatctcaaatgctgcaactgtcacaagccatgctgcttctaagttaatgggaaccacagataccacattagaaacttggtcaaatttcattaccttaagcccttataggccctttggcacttactatttctgcactggaaatggaaagtcagggaagaaaattgtgataacaaactcaaatgcagttctacaggtcctgtttttctctgctcaattaagcactgaagcagaagctgctcaagttccctataggagcttacgagatcatacaatttatggcaccgaactgcaacaaatggggcctcagaatgttgtgcacttggatcaacatcagctccagaatcttcctttgtctgaagatggtgctggtggctcaaatgcaaccattaacacggccttaaatgaccttggcctgattccaagagcaagactgtgcctccgggcagcagcagagtgggaggcaagaagaactgacaacgagaataagatcaaagagaagaaagattttgttgcgaaaaaattggacgttcttcgggaatacagaaaaatgtataaggataaaagggtgggtttttacgatggcttcagggagcataagcaaggtgaggatgacttcaaagcaaacgtgacgaggctagagctggcaggtgtgtgggacgagatgatggaaaaggtaagaagttatgaactcccagatgaatttgaaggcaacaaagattacattgaccttggaactgagcttcggaaacttatggaacctctggatattgccaattattaccgacatgggaggaattatgaggacagttcttcttcttacatggttaagggaagaccaaaacgatatagatatcctcaaagatggttggaacatgctgagagaaagtcacatgaatctctctcagcatcttgcttctgggccgaggtggaagaacttcactacaaaacaagtaggagtagtaacattgtctcattggatcaacaatttaaggaaaggattgagaaattagagattcaaataaaagcatggagtgacagaaaggaactagatgaggatgtcttcttggagggttctaccttggtgaagtggtggaaagcacttcctcaacaacacaagcaacattcatgcattaaaactcttattagagagtgacacgagacaaacatgcattgtaataagtccattcagcgagtgttaattggctgagtgagcttttttttgtttctcttgtttactttgtttcttatgtagtttttcttggttccttctcgtgtgcggtttgtgattctatcgttttcctttaataaatgccacaaccaaggttgcggctatgtacaactaaaaaaaaaaaaaaatttttttttcattttcaatacatagttttaccatgaaaaacatatataatactcccttggttccattacaagtgtaggataagagggctagggttcggaaacgaa

SEQ ID NO: 8131 - DNA, 1894 bp, Glycine max
gagccaccaccgttggattcggctcggagtagattcaactcggaagtttgagtatagataggttctttgcttggagtgagtgcgagtcaattcttcttggtttctttcgttagccttggaacaaacaaacataccagtcaaaaatcaaaatctcagagttgtttgaacgagaaattgaaatgtctcagaccaagaaattgacgccgaatctggatcagcagagcacgaaggtgctgaatctcaccgtgctccagcgaatcgatccgtacatcgacgagattctcttcactgccgcgcatgtctccttctacgacttcaacatcgaaagcaaccagtggagtcgcaaggatgttgaaggatctctcttcgttgtcaagaggaattcacaaccacggtttcagtttatcgtaatgaatcgccggaatacagataatctagttgagaatctattggattttgagtatgaacttaaaaagccgtacctgttatatcgaaatgcagctcaagaagttaacggtatatggttttacaatccagatgaatgtgaagaagttgcaaatctctttaacaggatacttaatgcgtacccaaagacacctccaactacaataccgcctgttaacataagtgagtctgaggaacttcagccagtgtcaattatcccggaaagccctctagagtcatcttcagctgctgcttctgcaattgatgctgttgaagatcctgcaaatacaaacttcttaagcacattgaaggttactggaaattatgcttccaatatggaaaattttagacagcattctgcaactgtcacttctgctcctggtggtttgttatctactgcacctactgtgcaaataccatctgcctctcattcaacttcatcgatatcaggcttcccccttgactctcttgaaacagccaagagtggcaatcaagtcattaatcttgttaagccttctactttttttgcatcaacgtcttcatcttcactgttagttccacctatttattcatctgtgccgcctagtgcagttgttcatcattccctgaatgtgccacgccaatacggcactccagtacttcaacccttccctccccctaatcctcctctttctcttacccctatttcaagctccactccaaatagacctgtaatcagcagggataatgtccgtgatgcacttttatcattggttcaggaggatcatttcattgacatgatgttccaggcattactgaaggtgagtcattcatgagtaatcaaactctgaaggttggatggaaactgcatataaagttagttctgtatattgtagttacacaccatcacatctaacaagaggtgtaacctagtagtccgtctttagctttagccacaactttgcacgatacatctgaaatggcctattgcacaatatactaacaaatcatatggtgcattaatacactataatcttcaccactgaatttatgtgtgtctacgtgaacaagttacaagagaaaacaatggtaaaaatatagaatgatcttaatcgctaagttgatataacgattgctccacgtttacacacaaaaactaatggtgaaggtgctgtgtattcttacactgtaactctgttgtgtattgtagaaatagtcgtctgtatctgcaaaatgataaaagtgtttcgatgtcagtgtcgccttattaccctttgttgtcttgtctgtactttgtggttttaaatactgtcatggttctgtcgattgagtctttgcattaagttggacaagtcctctctatcgaccaatgaagatgcatgtataatcccatgcttagtatgcattttgatataaataaataaaaatttacctttcaatttagtccttaaagaaaaaaaaaaaaaaaaaa

SEQ ID NO: 8132 - DNA, 2066 bp, Glycine max
  misc_feature (520)..(520): n is a, c, g, or t
ataatttcctcttcttctctcgtttccctctctttctttctctcaaagtgttgaacttgaagttgcagagagaaaatggattgagaattctctctcttttctctttctcttcccaactttccttccttgggatcattctgcttctttgctatggaagactcagattcagttgctacgctgatagattccacaacttctaagatacagcagctgcaaaaggcatttgctgaacttgaaagttaccgagctgttactctgaacttgaaatggaaagaactcgaggaacattttcatggtctggagaaatccttgaagaggcgctttcatgaattggaagaccaggaaaaagagtttgagaacaaaacaaggaaggctcaggagatactggagaagcggcaagcagctgtttatgccaaggagcaagccacgttgcagaggcttcaggagaaaagggatgctgctgtatttgacattgtgaatgctcgagaaaagcagaggaaggtcacgataagtgatttgnctattgtctccaatgggggtaaggggacatttcatgtggaggacaaaccagtggatgctgtgtcctttgcagctaatggtaatgtggaagaggtggtactttctcctgaaaatggaaatgtggagttggtatcttatccagacttggtaaaactttgtaaagagatggatgctgctgggctttcagctacgtaggcccccccccccaagaaccttgctgctgtaagggatgaaataccaaatgctttaagagctgctcctaatgctgcctgtttagttttagattctctggaaggattttactgtacagaagtgtcaaatcaggacgtaaagaaggatgctaacttattgggtcttcgccgaacctgtatcatgctgatggaatgtctctgtgatttcctgagcagctcaggttttgtttctaatgtgatttcagaagatatcaaggacagggcaaaagcagttgctgaagaatggaaacccaggctggatgctcttgacatggatgctagcaatgggaattccttggaggctcatgcatttttacaacttcttgctagttttggaattgcctctggttttgatgaggaggagttatctagattgattccaatggtgtctcggcgccgccaaactgctgatttatgtcgttttcttgggctgtcagaaaagatgcctggtgtaattgaggttttggtgaacagtgggcgacaaattgatgctgttaacttggcttttgcatttgatcttactgaacagttttgtcctgtttctttactgaagtcttacttgaaagatgcaagaaaagcttcttctcctgttagaagtgttaattcttctcccactgcacagattgaggtgaatgaacgagagctggtcgcacttaaggctgtaatcaagtgcattgaagaacataaacttgatgagcagtatcctctggatcctctccagaaacgtttggtgcagctagagaaggccaaagctgacaagaagagggaaactgaagccacaaaacctcaacccaagagaccccgtgcaaatggcgccggatatggtccacgtgtcactaacattctttccgacaaagcttcctatgctagagttgctgacaggtatccacagtttgtgtatgaccgaccaccttatatgtaccctgctccaactgataatcattgcccccctctcatgaccactgcaacgtataacttctctcccagccatggcaactactttggaaatgggtatcagtaccaagctacatatctccactagagttagctgatatgttaaaacaggcgactatgatccttttgtttaatatctagtctttaaccttcaagctgttgtatgttgcacttccacaatgtagtcttaagaatcactgaaaagaggtaaaatgtcaatctaaaatttaacttttgtagcacaagatatattctgatcctctaatgtatgaactctgttctcgttttttacactcttacgagatattcttcttattattaaaaaaaaaaaaaaaaaaaaaaaaaaaaaaaaaaaaaaaaaaa

SEQ ID NO: 8133 - DNA, 795 bp, Glycine max
ggctcgagtttctagcatccttcaagtaagacttcagtaaaggaatgggtgaaggatgctagaaaaatttcttctcctgtcagaagtgttaactcatctcccactgcacagattgatgttaatgatcgaggaactgattgcacttaaagctgtaattaagtgtattgaagatcacaaacttgatgaccagtaccctctggatcctctccagaagcgagcgacccaactcgagaaggccaaggctgacaagaaaagggtaactgaagcaacaaagcctcaacccaagagaccccgtgctaatggtgtgggatatggcccgcgtgtcactaacattctatctgacaaaacttcttatgctagagttgctgacaggtatcctcaatacgtgtatgaccgaccttacatgtaccctgcaccaactgacaatcactgccctcctctcatgggttctgcaacttataacatctctcctaatcctggcaactactttggaaatggctatcagtaccaagctacatatctccactagttagcacagatgatggtgaactgatgactaagaagctacatatccctttgtttaatatttagtcttaagtcttaacccttaagctgttgtatgttgcactttatctatgtagtctttaagaattgctgaaacaggtaaaatgtcatgttaaattttaacttctgtgctagaagatattctgatcctctaatgtatgtactctgttctcgttttgtaaaatatctttctttgtttcttagatctgaaaaaaaaaaaaaaaccccaaa

SEQ ID NO: 8134 - DNA, 1560 bp, Glycine max
  misc_feature (1429)..(1429): n is a, c, g, or t
  misc_feature (1454)..(1454): n is a, c, g, or t
  misc_feature (1501)..(1501): n is a, c, g, or t
atgacactatacggctgcgagaagacgacagaagcggctctttctttctctcaaagtgttgaacttgaagttgcagagagaaaatggattgagaattctctctcttttctctttctcttcccaactttccttccttgggatcattctgcttctttgctatggaagactcagattcagttgctacgctgatagattccacaacttctaagatacagcagctgcaaaaggcatttgctgaacttgaaagttaccgagctgttactctgaacttgaaatggaaagaactcgaggaacattttcatggtctggagaaatccttgaagaggcgctttcatgaattggaagaccaggaaaaagagtttgagaacaaaacaaggaaggctcaggagatactggagaagcggcaagcagctgtttatgccaaggagcaagccacgttgcagaggcttcaggagaaaagggatgctgctgtatttgacattgtgaatgctcgagaaaagcagaggaaggtcacgataagtgatttggctattgtctccaatgggggtaaggggacatttcatgtggaggacaaaccagtggatgctgtgtcctttgcagctaatggtaatgtggaagaggtggtactttctcctgaaaatggaaatgtggagttgtcttatccagacttggtaaaactttgtaaagagatggatgctgctgggcttcacaaattcatatctgacaaccgtaagaaccttgctgctgtaagggaggaaataccacatgcattaagagcagctcctaacgccgcctgtttagttttagattctctgaaggggttttactgtacagaagtgtcaaatcaggacgtaaagaaggatgctaacttactgggtgttcgccgaacatgtatcatgctgatggaatgtctatgtgatttcctgagcaactcaggttgtgtttctaatgtaatttcagaagatatcaaggaccgggctaaggcagttgctgaagaatggaaacccagattggatgctcttgacatcgatgctagcaatgtgaattccttggaggctcatgcatttttgcaacttctagccagttttggtattgcctctggttttaatgaggaggagttatctaggctaattccaatggtatctcgacgtcgccaaactgctgatttatgtcgttgccttgggttgtcagagaagatgcctggtgtcattgaagttttggtgaatagtgggcggcaaattgatgctgttaacttggcttttgcatttgatcttacagaacaattttcacccattcctttactgaagtcttacttgaaggatgctagaaaaatttcttctcctgtcagaagtgttaactcatctcccactgcacagattgatgttaatgatcgagaactgattgcacttaagcttgtaattaagtgganttgaagatcacaaacttgatgaccnagtaccccttggatccttttcagaaaccgagccgaccccactttganaaaggcccaagggttgaccaggaaaaagggttaacttgaagccaaccaaaggcctttaa

SEQ ID NO: 8135 - DNA, 712 bp, Glycine max
ccacgcggtccgcccaaattcggggctttcatcaattacacccttcattcgcttcattccacccttcacctgaaaaaaaaaaaaaaacaaacaaacaaacaaaaaggagtgcaaaccatgggcgatgcaattgatttgtccggcgacggaggagtcattaagaccattgtcagaaaaagcaaagccgatgctgttggtccaacagaaaattttcctcttgttgatgttcattatgaaggcacacttgctgatactggtgaagtttttgacactacacatgaagataacaccatcttctctttcgagattggaaagggcagtgttatcaaggcttgggaaattgctgtgaaaaccatgaaggttggagaagttgcaaaaataacttgcaagccagaatatgcatatggcagtgcaggatctcctccagatattcctccagacgcacaacttgtttttgaagttgagcttgttgcttgtcggccaaggaagggctccagtttgggaagtgtttcacaggagagggctaggcttgatgagctgaagaagcagagagagctagctgctgctgccaaagaggaagagaagacgaagagagaagaagcaaaagcagtggctgccgcacgtgtgcaagccaagttagaagccaaaaaaggtcaagggaaagggttaaggtgaagcaaagtaggaagttagcaaacatctatatgagttt

SEQ ID NO: 8136 - DNA, 1537 bp, Glycine max
ttactttgttgtttctgatatattgtcttgaatcccacatccatatttcagagctgggagaaaactatggattgtcatagtccaggacaaggtttgatgcctgctagttttaaggttaggacagttcctttggacggtgatgattctgcaacagaagaagttttggatcctgactttggagaggcagccattggtcgtgttgctccagttgattcaggattgtggtggattattttattacgagcatacggaaaatgctctggtgatctatcagttcaggagagagttgatgttcaaacaggaattaagatgattttgaggttgtgtcttgctgatggctttgacatgttcccaaccttattagtaactgatggttcttgcatgatagatcggaggatgggaattcatgggcatcctttggagattcaggcactgttttattctgccttactttgtgcacgtgagatgcttactccagaggatggatcagctgatcttatacaggcactgaacaatcgtctggtagctctatcatttcatattagagaatactattggattgatttgaaaaaattaaatgagatttaccgttacaagacagaggagtactcatatgatgcagttaataagttcaacatatacccagaccagatttctccttggttagtggaatggatgccaaacaaaggaggctatttaattggcaacctacaaccagctcacatggatttccgatttttttcactgggaaacttgtggtctgtcgtaaacagcttggccactgaggagcaatcacatgccattttggatcttattgaggccaaatggtcagatttggtggcagagatgccattcaagatttgttatcctgctcttgatggtcaggagtggcagataatcacaggcagtgatcctaagaacacgccttggtcctaccataatgcaggctcctggccaacactgctctggcagctcaccgttgcatgcataaagatgaagagaacacatattgctgcaaaagctgttgagattgccgagagacgcatattaagagacaggtggccagaatattatgacacaaagagatctcgattcgtcggaaagcaatctcgactatatcagacttggtcaatcgcaggataccttgtggcgaagctgctgcttgcagacccaagtaaagcaaacacattgatcactgaagaggattctgagcttgtgaatgccttgataagtgccaaccctagaggaaagcgagggcgcaaaaatttgaggcagacttacattgtatgagtcttcatttgcaattcatttggttccttttggtcaaattcatttttcttcttattgttagcagcatgttattctagctagatacgacagggatatgcaaaaatatatagtagtttgggttgattgtgatgaaacaaatactagtatatatataaatgtaattgtgaaaagtgatgacaatacttttggtacaagattgtaagtagcatacaaaaaattcatttcccagttctctctccctctctat

SEQ ID NO: 8137 - DNA, 733 bp, Glycine max
ttttaattttttttttttttttgccaaatcaaaagaccatttatatgtattaaatgttaagaatagagtagcacaaatacacatcacaaaaagctttgaagtacactgcactaaagacagagtagagtccaagatgatgtttcaaaccgtgcttcttgaattatactctcttacatcatcagaaaaacgaagtatcatttatctatttagcatagttctgtgcccaaactgtaggtcataacctctcataattgagtttctctgacttgataagcatgtccgtaggaagccatgctggagcagtggggacccctacccacgcaataagtgcatattctcccgtttcaaatatacgcatatccaggacctcaccacggtcctcataaatgtaatctaatcctttgtaataaggtgggtgcccaacagaaagataattgacgctattgagatatttctccttgtccaccctcacaatctgacctttcttcaaggaatagacgggtttcttgggtttaggagcagcagcacttgaagactgagcattagatgacccttcactcttcttgctctcgggtgtctctgcttgaccaccttgcactgcacgaatcagagggaaatgaacactttttgttctcaaagtttgcgggaaacgaggaaggcaagggaaggaggtgtaggatagagtagcagagaacgccatgaagagaaacacaatgccacgtgtttttcgatt

SEQ ID NO: 8138 - DNA, 1759 bp, Glycine max
gaagttcggtggagcatcgtcgtcgttatcataatcgggatagtagaagaaaagaaaaggcaagaaagaaagaagaagattaataaaaagaaagtgtagtattctgggagaaagagagaggaagaagaaacagggacaataagcatagggaactgtgaagagctgaaggaacctttgtttttgttgttgttgttgttgttcgtctggattgggttggctttagggctttgaatgccatctggggttttgctctcaggcaatcaagctccaaagctgacccctttctctcacttctaactcacataccttgttccattcttcactttctctctctagaactacaatggtagaagacatgtgtttcctctacaaggaaattcttgttatgaagcctccaaagagatcaccaatgttgttaaggacggcagtcataatattttcgatggtttgtggcgtttttatcttctctgtatgtctaaagcagataagcacccaagctaggactacatttatggacttcaaagtcattgacaaccattctcagagtatattgaagctaatgaatactcacctactacattatcccaaaccttcatcctttagcaggaacgagtgcgctcataatcctgtattattctttgccatattgtccaatcagagatctggtagtgggtggtttgagacccttttgaatagccacgttaatgtaagctcctatggggagatattttctgttagagagagaaggcaaaatgtttcttcaattttgctgactttagataaagtttacaatttggactggttcaatagtgcttccaagaatgagtgctctgctgcaactggtttgaagtggatgcttaatcagggattggtggagcaccataaggaaatagcagaatatttcaatcatagacgtgtttcaattatatttcttttccggagaaacttgctacgcaggatggtatcaatgctagccaattcatatgatcgttatgccaagctattgaatggaacgcacaaggctcatgtacactctgcagaagaggctgagattctttcgaagtacaagcctatcataaattctacatcattgctggatgacttgaaagatatggagatgagatctgctaaggctttagaatacttcaacagcactcggcatataattgtgtactatgaggatcttatgagaaatcacactctaaaagacgtgcaagagtttttaggattgccacagatggagttaacgagccgtcacgttaagatacatagaggaccattgtcagaccacattcagaactgggatgacgttaacaagacactgaaaggaaccatttatgagagttttcttgaagctgactattagtcgttatctcttctattctaactgctggagaaaggtgtaaataccatgccaactttgctgatcttttgccccctcaggaaagcctcagggttcaaaagttttggttttggttctggaacattacctcagtgttctgatgcctttttttgtcaccacctcgtgatcaattaacaccgttgataaatgaatgcttcttgtttctttgtagtatttttttttgttttttcttcttttttttttacctttctttagtgaacatgtatatggctttgccactaattgatttaagtaaagacgagcattgttttgttcaaaccggtgttcaatgatttgtttgtttgttcaattttaacccaatagatagataatacttgaacaaaaaaaaaaaaaaaa

SEQ ID NO: 8139 - DNA, 1872 bp, Glycine max
gattaataaaaaaagtgtagtattttgagagaaagaagaaacagacaataagcatagggaactgtgaagagctgaagggaaccaaccttgtttttgttgttctcgtgttgttcgtctggattgggttgggttggcttcagggctttgaatgccatctggggtttctttctcaggctatcaagctccaaagctgacccctttctctcagttctcacttcttcttcttcttctgttcttctctttctctctctagaactataatggtagaagacgtgtgtttcctctacaaggaaattcttgttatgaagcctccaaagagatcaccaatgttgttaaggatggcagtcgtaatattttcaatggtttgtggcgtttttatcttctctgtgtgtctaatgcagataagcacccaagctaggactacatttatggactttaaagtcattgacaaccattctcagagtatattgaagctaatgaatactcacctactacattatcctaaacccgcatcctttagcaggaacgagtgcgttcataatcctgtactgttctttgccatattgtccaatcagagatccggtagtgggtggtttgagacccttttgaatagccacattaatgtaagctccaatggggagatattttctgttagagagagaaggcaaaatgtttcttcaattttgcatactttagataaagtttacaatttggactggttcaatagtgcttccaagaatgagtgctctgctgcaactggcttgaagtggatgcttaatcagggattgatggagcaccataaggaaatagcagagtatttcaatcgtagacgtgtttctattatatttcttttccggagaaacttgctacgcaggatggtatcaatgctagccaattcatatgaccgttatgccaagctattgaatggaacacacaaggctcatgtacactctgcagaagaggctgagattctttcaaagtacaagcctatcataaattctacatcattgctggatgacttacaggatatggagatgagatctgctaaggctttagaatacttctacagcactcggcatatgattgtgtactatgaggatcttatgagaaatcacacaaagctaaaagatgtgcaagattttttaggattgccacagatggagttaacgagccgtcacgttaagatacatagaggaccgttgtcagaccacattcagaactgggacgatgttaacaagacgctgaaaggaaccatttatgagagttttcttgaagctgactattagtcgtagtctcttctattctaactgctggagaaaggtgtaaataccataccaacttttctgatcttttgtccccccaggaaagcctcagggttcaaaagttttggttttggttctggaacattacctcagtgttctgatgccttttttttgtcaccacttcgtgatcaactaacaccgttgatgaattgaatgcttcttgtttctttgtagtctttattttgtttatttttttttcctttccttggtgaacatgtatattcctttgccgctaattgattgaagtagagaggagcattgttttgttcaaaccggtgtttaataatttccttggtgaacatgtatattcctttgtcaccatttcgtgatcaaaaaaaaaaaaaaaaaattgttttaggaatttagcttttcttagtcacgggcatcaagtactttttaacttatgatttgtttttttttcccactgtgatgagcctctaaaacagttcatcatcgatcttgatgcctcctctatgggtagagcaagcaaataccaatggcaatcaggctttgtgcttgatgagaaacatttttgtagaattatttctta

SEQ ID NO: 8140 - DNA, 1915 bp, Glycine max
ttttctacttcaatcctgtcttgtctctttctcttttcttgttttgcttacctgcaaccggcttaagctgtgatcagacttatgagtcagaccaccaattttcagcatgacaaagataagtcctgaagttgaaatcaggatgccaatggaggcatttccaccagtttcagctgatgtgagctttatttctaatagttttccgaaatacaaactggatgttgataatcaagttctggaagagccagttgaggataacctgggtccttctttgaaggatgttattgaacaagaagctttcaatttgtcagaccaacacaagcgtatctcagttcgtgaccttgccagtaaatttgacaagaacttggctgcagctgctaagttgtctaatgaggcaaagctgagagaggtggcatctttggagggacatgttcttttgaaaaagctaagagatgccttagaatctttaagaggccgttttgcaggaagaaacaaagaggatgtggagaaagctatctctatggtggaagctttagcagttaagttaacccaaaatgaaggagaattgattcaagagaagtttgaagtgaagaagcttgtaaactttctcaaacaggcttctgaagatgctaaaaatttggttaatcaagagaagtcttttgcttgtgccgaaattgaaagtgctagagctgtggtgctgagaattggggaggcgcttgaagaacaagaaaaagcttcccaagcttctaaaccacaggatgtggatggactaattgaagaagttcaagaagctagaagaatcaaattgttgcatcagccaagcaaggtgatggccatggaatatgaactacgtgctcttagggatcaaattcgagagaaatctatattttcaattaagcttcagaaagagctaaccatgagcaagagggacgaggaaaataaatctcgtttatacatgttagatggttctgaagctttgggttcatatctgcgagtccagccttgctcagctgaagtgccacaggtttcgaaatgttcatttcagtggtaccgcttgtcttctgaaggcagctggagggaagttatttcaggtgccaacaaatcaatatatgctcctgacccctctgatgttgggagaatcttacaagtagatattgtctcaaatgggaaaaagctcaccctaacaactaatcccattcaaactgtttcaggacttggaagccatgtggagacacttctacgaaaatctaatactgattttaatgtagttatttctcaaatgaatggaaaagatcactcatcccattctactcattcatttaatgtggggagaatgaggataaagctatgcagaggttggattacaaaagctagagagatttactccccatcaatgcagctatgtggcgttagaagtgatgtcgcgaatgcagcgaaggtgttgttttggcaagcaagaaagggcctctcatttgtattaacctttgaatcagagagagaccgaaattcagccattatggttgccaggaaatatgctcttgattgcaatgtcgtgcttgccgggccagatgatctagtgtaggagcaaaaattaactgactgagcttttccaacaaacgtgagatttatcagattcttggtgtgagtatacgtgtgtgcttgttttgttaaagaaagatatgatttcatctgtgattgggtttttcactaattgagttgcattgttttaggcatggtttttttatttgcctaatcatgttgtaccaaactcaactttttttttataattattagttcatttgttcattgtggctaatttgcatgtgctagttgttttgtaatgtaaagcatatccgaaacatggtatataccaaaatttcctaatgattattggctcgtaaaactagtttcagaaaaa

SEQ ID NO: 8141 - DNA, 2225 bp, Glycine max
ccacgcgtccgtctcgggcgcgtgggcgctcccgcgcctgagcttgtgtatttatgagtgtttatagggattgggctagttgatagaaatggaagcaaaaatcgcaaaggcattggatagggttgcactcaatctgaagcgcaagcgagcgacccgatatgctgcacatttaagtggagcttcacaaccaatgttagggcattggtcatcttttacgtcaccaacaagcagggctgtcaaacgcatgagattgggtggatatagaaacaggctgacaaatgctggtcctcatattggacggtccttagctaggcgttttttgaattataaaaagagtgggagactggagcgtttgatgttctatgagaatgggtcatggttggactttccaaaggatgttgttgatttggttaagaaggatcttgaaatcaagcgggcagctgtggagatagagtcacatgggtatcatcttttttttgattttttacgtctgcataagatggaccttaaaactggcttgcaacaacctatagctttgattgatgaggcagggtgctgttttttccctgaaatctatgctgcttctgatgaagaaccttataatttgagcaaacaggaaggtggaaaaagtccagactcatatgcatctaatgaaataaaattacatttagaagttgaaataaatggagtggatcaatccaggttgagtgagtgtagtggggagtccaatgctctagttaagggtattcaaattgatactaaagaaaactgctgtcaatatgatgtagaagttgaagatagcattaacaaaaaggactgtggaaatgttggtgaagacattcagcaacatcaagacataggtttagatgcttatactgaatcagtatatggaaaattggatctgaattctgtacaaaagatgtttcttaagggaatgtgtagttttggcagtactgattctgacatagttgagatttaccactgctcaggtgcgtcaatgcaagcacgatgggagctgttccagaagcaagctgaaattaccaaaaaaaatcatggggaagctaacattcggtatgcttggcttgcttcctctaaaggagaactatctacaatgatgaactatggacttagtcattatggactatctggatcaaagtgcacatatggcattggtgttcatcttgctgctgttacttgccctgatgccagtgtgcgttattgtgatgttgacgaaaatggggttcgacacttggccctttgtcgtgtaataatggggaacatggagattcttcggcctggcactgatcagtttcatcccagtagttgtgaatatgataatggggtggatgccattgaatgtccacaatactatgtggtgtggaatatgaacatgaacacccacatctatccggaattcgttgttagctttaaagtctcgtctgacgctgaaggtcatttttgtggaagtgagggtaagaatgtttctggggttaatacagcctgtgacggtcctcatggcttgttaaattcagaatcttctactgtagataatggaaaagctcctagtatggtttctagcaccccaaaagttccaaaatccccttggatgccttttcctgtgcttcttgatgctatcagagatcaggttcctcccacgggtatggatgtaatcaaaacatattatgaacaattcaggtctaagcatatatcccgggatgattttgtgaagatgctgaggttaatagttggagatggtctgttgagaactacaataacaaatcttcagtataagataccttccggtggtgaattgaaagactcaatcaagaaagaagactgaggctgtatttctgtgaggaggtggagatctttatccttggagtcaattaatgtcaactgtttgctggataaatcaaaactatcttttttcatttccttttgtcatctatatttggacttgagacatacatgcaactagaactacattatagagtttagtttgaactgtttgtgattaggtgacctgtcaatcaaccctcttgtttatgttgggtttttatgataaaaaccagaatttggatattccattttttttttcactctaattttcaaaatgaaatcactttgtattgtaaatttgatatattgaacttcttgttgtggtaatggtgttttaaagcatataagggaaaaaaaaaaaaaaaaaaaaaaaaaaaaaaaaaaaa

SEQ ID NO: 8142 - DNA, 2765 bp, Glycine max
  misc_feature (2607)..(2610): n is a, c, g, or t
  misc_feature (2612)..(2617): n is a, c, g, or t
  misc_feature (2626)..(2626): n is a, c, g, or t
  misc_feature (2628)..(2628): n is a, c, g, or t
  misc_feature (2639)..(2639): n is a, c, g, or t
  misc_feature (2644)..(2644): n is a, c, g, or t
  misc_feature (2653)..(2653): n is a, c, g, or t
  misc_feature (2662)..(2662): n is a, c, g, or t
  misc_feature (2665)..(2665): n is a, c, g, or t
  misc_feature (2676)..(2676): n is a, c, g, or t
  misc_feature (2681)..(2681): n is a, c, g, or t
  misc_feature (2690)..(2690): n is a, c, g, or t
  misc_feature (2701)..(2701): n is a, c, g, or t
  misc_feature (2711)..(2711): n is a, c, g, or t
  misc_feature (2713)..(2713): n is a, c, g, or t
  misc_feature (2728)..(2729): n is a, c, g, or t
  misc_feature (2740)..(2740): n is a, c, g, or t
  misc_feature (2746)..(2746): n is a, c, g, or t
  misc_feature (2752)..(2752): n is a, c, g, or t
  misc_feature (2760)..(2760): n is a, c, g, or t
  misc_feature (2762)..(2762): n is a, c, g, or t
cgagaagacgacagaagggtacggctgcgagaagacgacagaagggtacggctgcgagaagacgacagaaggggaggcagaatctaggggtaacgcctccattatcagtcctttttcaggcgtggtttttacctaaccctacaattcgccgatccttccagttggggtttttcgctttcagcgaagagcggtgtatatagaaaccctattccccctatgcaccaggggaattgaatatagaaataagaaaaaggcaaaaaaaaaagaggttgaaaaagttgtatgttaaataggtaattctgttgtttttcgtgtttctggactcaggagctgagctgtttccagggaaaagcatgtacagtatgaactctaaatgcagtgctggggattgccaaatattctggatgttatggtcttcaccattgccaccacagtttctttgaaactgctcaaggtctaggcttctatttaacttctgcacctgagcttttatatttaagagtgcttatagatattgggctagttgatagaaatggaagcaaaaatcgcaaaggcattggatagggttgcactcaatctgaagcgcaagcgagcgacccgatatgctgcacatttaagtggagcttcgcaaccaatgttagggcattggtcatctcttacgtcacaaacaagcagggctgtcaaacgcatgagattgggtggatatagaaacaggctgacaaatgctggtcctcatattggacggtccttagctaggcgttttttgaattataaaaagagtgggagactggagcgtttgatgttctatgagaatggggaatggttggactttccaaaggatgttgttgacttggttaagaaggatcttgaagtcaagaaggcagctgtggagatagaatcaaatgggtatcatcttttgtttgattttttacatctgcataaggtggaccttaaaactggcttgcaacaacctatagctttgattgatgaggcagggtgctgttttttccccgaaatctatgctgcttctgatgaaaaaccttataatttgagcaaacaggaatgtggaagaagtccggactcatatgcatctaacgaaataaaattacatttagaagttgaaataaatggtgtggatcaatccaggttgagtgagtgcagtggggagtccaatgctctagttaagggtattcaaattgatactaaacaaaactgctgtcaatatgatgtagaagttgaagatagcattaacaaaaaggactgtggaaatgttggtgaagacattcagcaacatcaagacataggtttagatgcttatactgaatcagtatatggaatattggatctgaattctgtacaaaagatgtttcttaagggaatgagtagttttggcagtactgattctgacatagttgagatttaccaatgctcaggtgcgtcaatgcaagcacgatgggagctgttccagaagcaagctgaacttaccaaaaagaatcatggggaagctaacattcggtatgcttggcttgcttcttctaaaggagaactatctacaatgatgaactatggactaagtcattatggattatctggatcaaagtgcacatatggcattggtgttcatcttgctgctgttacttgccctgacgccagtgtgcgttattgtgatgttgacgaaaacggggttcgacacttggccctttgtcgcgtaataatggggaacatggagattctccagcctggcactggtcagtttcatcccagtagttgtgaatatgataatggggtagattccattgaatgtccacgatactatgtggtgtggaatatgaacatgaacacccacatctatccggaattcgttgttagcttcaaagtctcatctgatgctgaaggtcatttttgtggaagtgagggtaagaatgtttctggggttaattcagcctgtcagggtcctcatggcttgttacattcagaatcttctacagtagataatggaaaagctcctagtatggttgctagcaccccaaaagttccaaaatccccttggatgccttttcctttgcttcttgatgctatcagaaatcaggttcctcccaagggtatggatgtaatcaaaatatattatgaacaattcaggtcaaagcatatatcgcgggatgattttgtgaagatgctgaggttaatagttggagatggtctgttgagaactacaataacaaatcttcagttcaagataccttccggtggtgaattgaaaggctcaatcaagaaggaagtctgaggctgtatttctgtgaggtggagatctttctccttggagtcaattaatgtcaactttttgctggataaatcaaaatgaagttgtgatattgttatctcttaggcaaactatctttttcatttccttttgccatctttatttggacttgagacatacatgcaactagaactatattagagtttagtttgaactgttcgtgatcaggtgacctgtcaatcaatcctcttgtttatgttggattttatagtaaaaacctgaatttggatattccttttttttccactctaattttcaaaatgaaatcactttgtattgtggaaaannnnannnnnnaaaaattcntnccccccggggnacccnctttttttnaagcggccnccncccgggggganccccnccttttgtncccctttaggnggggtaattncnaacctggggaaaacnngggcataactngttccntggggnaaatggtntnccg

SEQ ID NO: 8143 - DNA, 1414 bp, Glycine max
tcgatcagctacgtaggccccccccccgacagacttcctttgctcaaagccaaaccaaattttctctctttcacttatttattgactccccaaaagcttttcaaatatctctgttcctctctcacgtaccttctccctatctttcactccacttcttaacaccacaaaacagaataacggccgagcaaacaacaagaaaaatggtgttgttgtccaaagcaacaacagaacaatactcctacattaagaactgcatgccaaccaaattttcctcaacaattcccatagtggacctctccaaacctgatgcaaagacccttatagtgaaggcttgtgaggagtttggattcttcaaagtcatcaatcatggtgtctccatggaagctatatccgaattggaatatgaagccttcaaattcttctctatgtcactcaatgaaaaggaaaaagtaggacctcccaatccatttgggtatggtagcaagaaaattggacacaatggggacgttggttggattgagtaccttcttctcaacaccaatcaagaacacaacttctctgtttatggcaaaaaccctgagaaattcaggtgtctgttgaacagttacatgtcttctgtgaggaagatggcatgtgagattcttgagttgatggcagaagggttgaagattcagcaaaaggatgtgtttagcaagcttctaatggataaacaaagtgactctattttcagggtgaatcattacgctgcttgtcctgaaatgactctgaatgatcagaacttgattgggtttggagaacacacagacccacaaatcatctctctgttaagatccaacaacacttcaggccttcagatttatcttagagatggaaattggatttcagtcccaccagatgacaaatccttttttattaacgttggtgattctcttcaggttatgacaaatggaaggttccgaagtgtgagacacagagtgttggcaaatgggttcaagtccaggctttcaatgatttactttggaggtccacctttgagtgagaaaatagcaccattatcctctctcatgaaaggaaaagaaagtctatataaagagtttacctggtttgagtacaaaaaatcaatctacggttcaagattatctaaaaatagacttgaacattttgaaagaattgcagcttcgtaatatatattctagagaattgtttgagacacttgtcaatacaaaatgggagattacaatatgtagtttgtatactataaatgctttttttttttttttttacttttaaggttatttatcaatcagaaggcttcatagacaggataacatatgtatccattttgtttaaatgctagtgaatgacatctaatgttgttatcaaaaaacatttgttaatggtcaaaaacttgaaa

SEQ ID NO: 8144 - DNA, 725 bp, Glycine max
tcgagtcagctacgtaggcctccccccctttctgcgccggccactcagtttctctttcgtttttctttttcttttctccttttcttcttctttcacttatcctattagtatttccctcagtcggtttattcattctctctgtttttttccttccaccgactgctagttttcgtttacaccactaacttcaaggttggtagcattatcttctcctttaaattatactaatcttacttcccttaactttcgtttggtttttattcttccatttattgtattttacatcatgaagaagaggcttttgggcaagtcaaggttctttcttctttcctcggttcccttccctccaagggaagaacctctttagataccctttttgctctgagaacacatacgaccacactctcttccatttcatccataaaacttggagtgcagtcaaagagtcaaagattcacaacatgtttccgaggggcagaaggagtgacattggtggccatggcaacacaaacgtggctgaatgggaattacggccaggaggaatgctcgtgcagaaacgtaacttggatttgaatcaaaattctgcatctaaatctaccatcaaagccaaagcgaagtatggctcatcctatcaccaaattcaaatcagttctcatgcaagtttcggtaattccatccttgggcatttctctcttcattttatttaaaaatttaatctttacact

SEQ ID NO: 8145 - DNA, 1280 bp, Glycine max
tcagctacgtaggccccccccccaagctactattgattgttgaagtttctcttctcttactctgactcctatattcctattcctacaaaataaaaaaatcgcattcactttttttcttcccttatattccttcttccattcattcattcacattctacgctttcttcagagcttgcacttgttccacccttctccaattctcttatctgtattcaggcactcttcagagaacactttgtgagtcaaaagagacatggccttagaccagtattttgaggaggctatgccccagttggattccttcgaagataaatcgtttctcgaaacatggaaatgtgacagtgacgatatcgcagattctgatagaaatgcctctggtgtctttgattgcaacatctgcctggagtgtgtgcaagatccagtggttactctttgtggccatctctactgctggccctgtatttacaaatggcttaatttcctaagtgcctcttgtgaaaatgaagagaagcaacaatgtccagtatgcaaatcagaaatctcacagtcatcccttgttcccctatacggccgcggccaaactgagttaccttctaaaggcaaaggccaccaagtaggggttgtcataccaagaagaccccttggtccttcacttgattctgttactgtttcccgacctatttctcacgtttatcatcgacactatccgaatcaacctcaacaactcaacttaattcctggcagttacacttcaatgttcaacacaggtggttcactagcaaatgcatttgatacaacatatggagtctttggtgagatgatatatgcaaggatctttgggaaccagatgactaacacatacacatacccgaattcatatgatctttcagggaacagtaatccaaggatcagaaggcatttaatgcaagttgatagctcactcaatagaatcacttttttcctcctttgttgcatagttttgtgccttctcttattctgactgctattgcatactttttgtgcaatacatccctgtatagaatacaagcattatgcggattctgccagatgcatcatatactatagagaagttgtctgatgatgagagagatatttgtaactaggcccgtttgggtacatagcttaattaaggacttgttgaataaatgcttatcatatgataagcgtttgtgtataaattgttataatcaaagaaaaaataaggttaaactattgtcataaaaaaaaaaaaaaaaaaaaaaaaactcgagactagttct

SEQ ID NO: 8146 - DNA, 2169 bp, Glycine max
ggctcgagaaaagatagagcaaggaactcataaaagtgggaggaatgtggggttgaaagcttatgttgtgtgccaagtgcttgagattgttgtcaaaaaggaaataaaacaagctgaaataaaatctacacaagtcaaaatcaggaggttcttccgaccagaagatttatcaaatgagaaggcatattgctctgatatacgagaggtgtattacagtgatgaaacatatataatctctgtagaatccatagaagggaaatgtcaagtcagaaaaaagaatgatattcccgaatgcagtgctcttggtggaatcttccaaaatgtttttttctgcgagctcttgtatgatcctgccactgggtcactgaagaagttgccggctaatataaaagtaaaatattcaagtggacaaacatctgatgctgcagctagaaagaggaaaggaaaatgtatagagggagatggtgtttcagagtccacaaaggaaggaaaaacattaaatgataaacgtttagcaaccttggacatttttgcaggctgtggtggcttatcagaggggttgcagcagtcaggagtttcatcaactaaatgggctattgagtatgaagaaccagccggggatgcatttaaagctaatcatcctgaggcattggtgttcattaacaattgcaatgttattcttagggctgtaatggagaagtgtggggacacagatgattgtatctcaacatctgaggctgcagaattggctgcaaagcttgatgagaaggaaataagtagtttaccaatgcctggacaagttgatttcattaatggtggtcctccatgccagggtttctctgggatgaataggtttaaccagagcagttggagtaaagtccagtgtgagatgatattggcattcttatcctttgctgattatttccggccaaggtatttcttgttggagaatgtgaggaactttgtgtctttcaataaagggcagacattccgtttaactttggcttcacttcttgagatgggctatcaggtgaggtttggtatccttgaggctggagcatatggggtttcccagtcaagaaaaagggcattcatatgggctgcctctcctgaggatgtgcttcctgaatggcctgaaccagtgcacgtcttttcggcccctgagttgaagatcacattatcagaaaatgtccagtatgctgctgtccgcagtactgcaaatggtgctcctttacgtgcaataactgttcgagatactattggtgatctcccagctgttggcaatggagcctcaaaaggaaacatggagtatcaaaatgatccagtctcatggtttcaaaagaagattcgaggtgatatggttgtcttgactgatcatatatcaaaggagatgaacgaattgaacttgattcgatgccagaaaattcccaagcagcacctggcctcttggcgtgaccttccagaagaaaagataaaactgtctagtggacaagttgttgatttgataccatggtgcttgccaaacacggctaagcggcacaatcaatggaagggactgtttggcaggttggattggcaaggaaatttcccaacttccgttacagaccctcagccaatggggaaggttggaatgtgcttccaccctgaccaagataggattcttactgttcgtgaatgtgctcggtctcaaggcttcccagatagctatgaatttgctggcaatatcatacacaagcaccggcagattggtaatgctgtgcctcctcctctagcatcagcattggggagaaagctcaaggaagcagtggacagtaagagctccacttagaagatgggccttctacattaggtcatgcttattgtattcataacagtcaccaagatattgcaaatcatcattccgggttccaaaaactagaaacccttgtatatagtgatatccattggtcatttgttgaggctaattccttgtttaactttcctcaaccaaggaattgaatggatgatgctcattttctatcaactaggattttcttgattagatggtattttggctgtttatgaaagaaatggttgggaattgattacctcccaatgtgtagttgaaaattgagaccaattttttttaacctgttatgaatatttgttgttgcaaaaaaaaaaaaaaaa

SEQ ID NO: 8147 - DNA, 544 bp, Glycine max
  misc_feature (540)..(540): n is a, c, g, or t
tttccgcagccaccaccacccccaacccaccggagcagaccaaggcggcgccgcggcgacctcatctccggccaagggaaatgactaccgttccggggtctctggtgtgggagctggtgaagaagaacaactgcttcttgatcaagcagttcggcaacagcaacgccaaggtgcagttcagcaaggagcccaacaacctctacaatgtccactcctacaagttctccggcttggcgaacagcaagaccgtggcggtccagccatcagcaggagaggacaaggctgtcgtcctgtccacgaccaagaccaagaagcagaacacccctgccaagctccagcacaagactctgatgcgcaaggagttccgcaagatggccaagtccgtcaagaaccaggtctgcgacaactactacaggcctgatctgaccaagccggcccttgcaaggctgagtgccgtgtaccgcagcctccaggtttccaagtctggaatcaagaagaagaacaggcagccaactaagctgtaaactcattgagattgcntttc

SEQ ID NO: 8148 - DNA, 508 bp, Glycine max
cctctagcctccagctctctctccctctctctcgcgcctcctccctccccctgcaggaagctcgtcgagatgtcgtccgaggcggcgaaggtggtggtgccggagtcggtgctcctcaagaggaagcgggaggagctctgggccgccgagaagaagaccaaggccgtcgaggagaagaagaaatccagcgagaacgtcaaggtcatctacgcccgcgccaagcagtacgccgaggagtacgatgcccaggacaaggagttggttcagcttaagcgtgaggcccggatgaagggtgggttctatgtcagtcctgaggctaagctgctgtttgttgtcagaatcagaggtatcaatgccatgcacccaaagaccaagaagatcttgcagctgttgcgtttgagacagatattcaatggagtgttcctgaaggttaacaaggccaccatcaacatgctccgcagggtcgagccatatgttgcatatgggtacccgaacctgaagagtgtga

SEQ ID NO: 8149 - DNA, 1258 bp, Glycine max
acaagaataatctgggttccacggtgatgtcatgtcaatggctgcaactctcactgctgtaagaattcccactttccaccaacgccatctcaaacaacacttcacggcaccctcttcctcttccttacgcctcctcaatctcgcaaagatggaaggaagtgagatcagtgagcaagtagtaggggaggatttgggagcaaagaagaaagtttttgtagctggagccactggtagcactggcaaaagaatcgttgagcagttactggcaaagggttttgctgttaaggctggggttagagacatcgacaaggccaagacaaccctttcctctgccaacccatctcttcaaattgtgaaagctgatgtcacagagggttctgataagctagctgaggccattggtgacgattcagaagcagtagtatgtgccacaggctttcgcccggggtgggatttacttgctccctggaaggttgacaattttggcacagtaaaccttgttgaagcatgcaggaaacgcaatgttaacagattcattcttatcagttccattttagttaatggagctgctatgggacagttactgaatccagcttacatctttcttaatgtttttggactcaccttggtagcgaaactacaggcagagaaatatatcaggaaatctggtataaactatacaataataagaccaggcgggttgagaaatgatcctcctactggaaatgttgttatggagccagaggacaccctttatgaaggttccatatccagagatctagttgctgaagtggctgtggaggcattggcttatcctgaggcattttataaagttgtggaaatagtgtctcgccctgatgctcctaaacgcccataccatgacctttttggttccataaggcaacaatgatgcctgagatttggacttgattgcagattagcaaatgttgatttgctttatggtggcaaatttgtatctcaactgtgttcctatgtgtgttgtttcattcaattggtacactagaataatgtgtaaatatttcagtatatctttaattttattctcctacctgccaaattaaaggttggtagataattcagcactaaaaaaaaaaaaaaaaataaaaacctaattcaattagcacatgtttgggtaaacgacttaatgaagcacttaataagctcttaccaaatgagagttagtcataagcttattgtaacaagttaaaaagagcttagtttgataagtttttttttt

SEQ ID NO: 8150 - DNA, 1328 bp, Glycine max
tcgagcagctacgtaggccccccccccatctctattatggcaagactctgctcccttgatgatgataacttgattccatgtttggcttggggatggtaaggcctaatccttacagctgaaaatgtatcgaagaaagttagtttttccaatattaaaatgattcaacttctgtctctaatcagcgcccgctcatgatcaagaagtgtttagctttcacagtgatcattcaccttgccatggttttgaggaagttttggcttgctatcaaaaagttgttccaaatttgagactgtctggaccaacatcttatgctcctgtgattgaggctgcaatagacatagttgagaaaagtcatggccaattccatgtgttagttattgttgcagatggccaggttacaacaagtgctgcatctgaacatggagaactcagtccacaagaagcaaggacaatcaaagcaatagttgatgcaagttcatatcccctttctattattctggttggagttggtgatggaccctgggaagacatgaagaagtttgatgacaagatacccgctcgcgactttgacaattttcagtttgttaacttcactgacataatgaccaagaaatcaagcccctcagaaaaagaaactgcttttgctctggctgctcttatggagatacctttccaatataaagcagccattgaacttgaactacttggtcgtgcaacagggagatcaaataaaatagttccaagacctcctccagctccatattcccggcttgtgccaccagctcgcgttctgagcaatatgccaactttcatggatgatgagagaaaccaaatggcttgtgctatttgtctgaccaataaaaaggatttggcatttggatgtggtcacatgacttgtagagattgtggatctaggttaaccaattgtccgatatgccgtcagaggatcaccaatcgtcttagggtgttttctagctgatagcagaatggaaaatcatgtacaaagtcaaattcaactaagggctaagaagataaatgtcttctgtacatttgttggtgtggctttcaagagtgcccaagaatgaccatggtgttgcataaaggtggtttcacattgtagggatgatttaggagttgagacaattgtgcatgtatttgctagttgttcaattaggccatgtcccatgtgttggaatttgaagaattgtattttaaccgctgcacattgtacatattgtttatatgtacttatgttaaaaatttatgtatgcaggaaaacaaacaacttatagcccccgtgctaggttgcattttgtttaaacttaaga

SEQ ID NO: 8151 - DNA, 1735 bp, Glycine max
  misc_feature (1735)..(1735): n is a, c, g, or t
tcagctacgtaggccccccccccgtctactcttcaatacatcataattgtgttagccaagaaatgaagaaatcaaagcattgaatgaagctgcgatgggaaactcgcatgctaaaaagcgtgacactcaattttccagaaacgttgttgaagggagagttccctctccgaaaaacaaaaccttgtcgccgtcaccgtcgctagaaccaccactaccacgagaaccaccaccaccagcagctatgtctttgaataagggttcggggaaactgtctgccaaagagaaatatgctctgattcccgataacttcaccaccctagaacaggttacaattgccttgaggaaggaaggtttagaatcatcaaatcttgtccttggaattgatttcacaaaaagcaatgaatggactggaagtgtctcattcaacaatagaagcctgcatgctattggaagtacacctaacccctatgagaaagccatctctattattggcaagactctggctccttttgatgatgacaacttgattccttgttttggctttggtgatgccaccactcatgatcaagaagtgtttagctttcacagtgataattcaccttgccatggttttgaggaagttttagcttgctatcaaaaaattgttccaaacttgagactgtcaggaccaacatcttatgctccagtgattgaggccgcaatagatatagttgagaaaagccatggccaattccatgtgttagttattgttgcagatggccaggtaacaacaagtgctgcgtctgaggatggagaactcagtccacaagaagcgaggacaatcaaagcaatagctgatgcaagttcatatcccctttctattattctggttggagttggtgatggaccttgggaagacatgaagaagtttgatgacaagataccagctcgcgactttgacaattttcagtttgttaacttcactgacataatggctaagaaatcaagcccctcagaaaaagaagctgcttttgctctggctgctctaatggagatacccttccaatataaagcagccactgaacttggactacttggtcgtgcaacaggaagatcaaataaaatagttccaagacctcctccagcaccatattcccagcttgtgccaccagctcgtgttctgagcaatacgccaactttcatggatgatgaaagaaatcaaatgccatgtgctatttgtctaacaaataaacaagatttggcctttggatgtggtcacatgacttgtagagactgtggatctaggttaaccgattgtccgatatgtcgtcagaggatcaccaatcgtctcagggtgttttctagctgattgaagaatggaaaaatgtataatgtataatttgactaagggctaagaagataagtgtcttctatacatttgttggtgtggctttcaagagtgcccaagaacaaccgtgttattgcatagaaaaggtggcttcgcaatgtagggatgatttaggagtcgagaaaattgtgcatgtatttgttagtagttgttcaattaggccatgtcccatgtgtctgaatttgaataattgtattttaactaatgcacattgtacatattatttatatgtacctatgttaaaactttatgtatggttagagattgtgcaaaatatccattggaatcccatacttgctattatattctacaaaaaaaaaaaaaaaaaagaaaaaaaaaaaaaaaaan

SEQ ID NO: 8152 - DNA, 533 bp, Glycine max
gttcccaatccgaatccaccaacgcagaggagtggcgagagaatctccggagaagaagcaggagcgggtgcggcggcgaggtcgatgtcgacgacggcggggtacctggcgcggcgcgcggggcagaaggagcgggtgcggctcctctaccgccgcgcgctcaaggacaccctcaactgggccgtccaccgccacctcttctaccaggacgcgtccgagctcagggacaagttcgaggccaacagaaatgtggagaacctggacgtgatcgataggctcatcgaggacgcggaggcgcagcagaggaacttccagcacccggatccttacattgttccatgggctcctggtggcactaaattcacaaggaaccctcctccacctgaagggattgagattatctacaactatggcaaagaagaccaatgaacaagaatcatgcatttgtgagcagagcctggcacctgcggagtgcaaaggacttactttcacttttccagatgatagcatgcaactgagctgctgtatgattg

SEQ ID NO: 8153 - DNA, 521 bp, Glycine max
atcgggttgttgttgttcctcttcctctgtctctctctccttcgtggtgtcgtcgcctctcatccaagctttagcgagggaagggattcaggccgtgatggtggggaaaggaggcgaggccgcggcgtcggcgcagcacaaggaggagcacgaggaagacggcgacatggttggcgtggtgaagctgatcagcgccgagggtttcgagttcgtcatcgacaagaaggcagccatggtctccaacaccctccggaacatgctcacctcacctggtggcttcgcggagacgcgcgagggcgaggtgaggttcccggagatcagcaccgcgatcctagagaagatctgccagtacttctactggtcgctccactacgccagtgggaaggagacggcggagttcccgatcgagccagaaataacgctggagctgatgatggctgcaaactacctcgacacttagcctggaaaactgcatggttgttgacaagatgaatccatcgtccacttgggttcattcagta

SEQ ID NO: 8154 - DNA, 2024 bp, Glycine max
cttttctgcaagaaaacatttcagggtaacccatgccctccttatctggaggcagtttgcaggaatatcttaaaaatgtgtggggggttgccactggcaattgtggcaattggtggtgcattggctacaaaaggcagggccaacatagaagagtggcagatggtttgcagaagtttagggtctgaaattgaaggcaatgacaaactggaggatatgaagaaagtgctttccctcagtttcaatgagttgccttattatcttaagtcttgtttgttgtacctaagcatctttcccgagtttcatgctattgagcacatgcgattgattcgtttgtggatagctgaagggtttgtgaacggagaagatggaaagacactggaggaagttgcagacagttacctcaaggagctcttggacagaagtctgctgcaagtggtagcaaaaaccagtgatggcaggatgaagacttgtcgcatgcatgatcttctaagggagattgtcaatttgaagtcaaaggatcagaactttgcaacaatagccaaagaccaagatataacctggccagacaaagttcgacgcctatcaatcataaacacattgaataatgtgcaacaaaataggactgcattccaacttcggtctctgctaatgtttgccttatcagataattcactcgagaatttttctatacgtgcattatgttccactggttataagttactcagggtgttagacttgcaagatgcgcctttggaggtttttcctgctgaaattggcagtctataccttctcaagtatctgagtttgaagaatacaaaggtgaaaagcattccaggttccattaagaagctgcagcagttggagacattagatcttaaacacactcatgtcactgtattgccagttgaaattgtggagctccaacgattacgccatctcttggtgtatcgctatgagattgaatcctatgctaatttacattcaaggcatggcttcaaggtggctgcccctataggacttatgcaatctttgcaaaagctttgttttatagaggcggatcaggctttgatgattgagctaggaaaactcactcaactcaggaggcttggcatcagaaagatgagaaaacaagatggtgctgctttgtgttcatccattgagaagatgatcaatctccgctcattgtccataactgcaattgaagatgatgagataattgacattcacaacatcttcaggcctcctcagtatctccaccagttatacttggctgggcgcctagacaattttccccactggataagttctctcaagaatttggtccgagtgtttctaaaatggagccggttagaagaggatcctctggtacatcttcaagatttgccaaatctaagacatcttgagtttcttcaagtttatgttggtgagacattgcatttcaaggcaaaagggtttcctagtctgaaggtgttaggccttgatgatttagatggactgaaatcaatgactgtggaggagggagcaatgcctggtcttaaaaagctcatcatccagcgctgtgattcattgaagcaggtaccattaggcattgagcacctaacaaaactaaaatcaatagagctttttgatatgcctgaagaatttattacagcactgcgtccaaatggaggtgaggattattggagagtgcaacaagttccagcagtttatatctcctattggagggataggggttgggatgtctactcattagagacattaggagagagagagagtgattccagtgggggtactgcaatcagaagtcttgaaatttgtacgctctggaaggtttaacttttattttctttcttttaacatactacatatgtgagtatgcaagtgaatgcagtattttgttctttgcagttacctgagtcttgactgcaaatttcttcaagtttcaaccaaataaatcagggaacataatttgtttcttgaatatgaattccgaggttactgaataaaaatatagttagcttttg

SEQ ID NO: 8155 - DNA, 772 bp, Glycine max
atagttcctccgggttgtagagagccttttttttaggggtttccctttgagaaaatagaaggcttttaattgctaccattgctttatattttattgttataacatacaactataagcttccatggctgagtttcaaaactacaacaagtgcaagcaagtaactaataaggttgttcaagcaaagagaaagggatatgggattagcagcaagtgtgcttctttggtgaaggagcaacgtgctcgtctctatatcctacgtcgatgtgccaccatgctactttgttggtatattcaaggagatgattaagttcacaaaaaaccactcttataatttcactctctcttttggtcttctttagctatgtgtaatatattgtcataaagtttaccatcttctaaaatggtgacatctttgtttgaaggaagctccttgccatgcatggtttgccagcacagttgggttgggctagcttcactgtgggtttgtcattttagtctcttttcttccttcattttttttaacccatttggaaaaacccaatgggtttttacggggaaaggagagttttatggataccttcagtgctgctttttccacaatatgaagctggcaaggagttgatgattaactaaacgtcctttagctgatgctagaataattggaatgtactttagccttttttcccttataccaaaacccatttccttgtattagatatattgctctttctatgactaatgacatcatgacttaacatataaaaaaaaaaaa

SEQ ID NO: 8156 - DNA, 1383 bp, Glycine max
atatatcctccccctaaagcttcaacctttgggacgccctactttttttcttctatcttcattgatcatcacttctctttcttcattttccttttcggtgggaattaggataaccctcctcaatttttcaactctaaatttgatcatcaccttcacccactttactcttactaggaggaacccttctctctgtgtgtgtgttctgagttgattctgtgcttcagctttccacaaagtaaagtagaaagatggcaatgattccttaccacctttgccgtttaccttaccaggattccctcaaagcacttgaggctgatatacagcacgccaatgctttggctgctgcaattcccagagccaagggtgagactcttcttcaaatgaaattggtttacaatcacttggctcccctcttcctgttatttctacaatggatggattgttcttgtgcaggctttctccataggtatctcgacctcttccacatacttatttacaaggtacataatgatggtagatcaatcatgcctactcatggaaggaaggctaccattggggacttttatgctgttatattaccatctctccaacggcttcatggtagtttggagaagttggaggttgttaaagaagaaggccagtcaagcatagaaggtccaagttatggcaagaaggtcattgaagaaggtgtgaaactaaccgccaatgttgatttgcaaagagaagatgaatgtgggatttgcttagagccttgcaccaaaatggttttacctggttgctgccatgccatgtgtattaaatgctaccgcaagtggaacagaaagtcagagtcttgtcctttttgccgtggtagcttgaggagagttaattcggaggatctatgggtattaacttgtaatgatgatgttgttgatgctgaaacagtttctaaagaggacttgttgcgtttttatctctatgtcagcaagctgcctaaagatcacccagatgcacttttcctaatgtattatgaatacctcatttaattttctactaaataagaagaagaaaaaaaaaatgtacagataggaaattccggactgcaaatgtgaatagagtctggtacaaaaagaaaatactctggtaatttaatcacagttgttatggtaagagaaatttctggttttttagtccagaaaaaccattcttcttactcccgtgatatatctccattgtagacattgttcttgcaattaacttggaattccttgcataaaggatccattaagttaaatcttcttcttgtatgttagttgttgacacagactgatattgagaagatgaatctgttctgtgtgattgtattggacgttggaaatgttaatatatgcaaaaccattgatt

SEQ ID NO: 8157 - DNA, 1334 bp, Glycine max
  misc_feature (1332)..(1332): n is a, c, g, or t
  misc_feature (1334)..(1334): n is a, c, g, or t
aatcatatgactcagcattccacacaatcatagaaagcaacgaaacgcaacacaacacatcgtaatacggcattccgttcattgtttctttcaactcaactcaactctctctcacccaccacaaaactagcagcaaaatttgaacaaactaccgaaacaaaaacaaaaccaaagcaaaaatcgttttttttttttctgttccctcatcctcatctattggattaactgattaatattattagggtcccttgtaaaaagaagattcttcatccttccacacaccccccacaactactgggagagaaaaaaggaaggaaattttgctattttctgagactcttgattttattttatttttatattttttctgctctgaagaagaaagatggaaatgatggcataccagtttactcggttaccttactcggattccctcaaactgctcgaggctgatatacagcatgcaaatgctttggctgctgcaattcccagagccaagggtgggactcttctccaaatgaaattggtttacaaccacttggctcctctctttctgttgttgctacagtggatgaaatgttcttgtacatgctttctacatagatatctcgacctcttccacatagttgtatacaaggtacacgatgatggtagatcaaatgtggcttctcatgggaggaaagcaagcatccgggacttttatgctgttatccttccatctctcgagcggcttcttggtagcttggagaagttggacatttgtaagaaaagtcattctagcatagatggtattagttatggcaagaaaatgatggaaggtgatgggaaactaatcaatatcgatctggaaagagaagatgaatgtggcatatgcttagagccttgcaccaaaatggttttgcctaattgctgtcatgccatgtgtatcaaatgctaccgcaagtggaacacccggtcagagtcatgccctttttgccgtggtagcttaaggagagttaattctgaggatctatgggtactcacttgtgatgaagatgttgttgatgctgaaacagtttccaaagaggacctgttgcgtttctacctttatatcaacagcttacctaaagatcaccctgatgcacttttcttaatgtattatgaatacctgatttgatgttatttttactaaataaggagagagagaaattgtacagatagggaaatccggactgcaattgtgaatagagtctggtaagaaatatttctaatttgtaaggcacagctctgctaagataaatttctgttattctagcccagaaaaaccccaaaaaaaaaaaaaaaaaaaaaccntn

SEQ ID NO: 8158 - DNA, 500 bp, Glycine max
atctcttctcacttcgcaccctgccattccaaaacctctcaaaaccctcgttctccccactccccgcctccgccgccgccgccgccggtgcctagcaagatgagtcggcaccctgaagtcaggtgggctcaaaggattgacaaggtgtatatcacagtacaattgcctgacgcaaaggatgccaaggtcaacctggaacctgatggtgtattctctttctttgccactgctggaactgatgggaactcctatgaatcgaaactggatttgaatgacaaagtgaatgtcgaggcaagcaaagtaagtgttggtgtcaggtccatattctgtattttggaaaaagccgacgccaaatggtggaataagcttgttccagatgatcagaaggcaccacacttcgtgaaagttgattgggacaaatgggtcgatgaagatgatgatggtgctgatgttaatgttgatgggatggacttttcgaatatgggtggcatgggcggtat

SEQ ID NO: 8159 - DNA, 505 bp, Glycine max
gaattagggttttcgagtctcaggaggaggaggaagaagaggagcagcagccagcagcaaccatggttctcaagaccgagctttgtcgtttcagtggccacaagatttacccagggagaggaatcagatttatccgatctgactctcaggtgttcttgttcattaactcgaagtgtaagcattactttcataataagctgaagccttccaagcttgcatggactaccatgtacaggaagcagcacaagaaggatgcagctcaagaagctgtgaagaagaggagacgtgcgactaagaagccgtactcaaggtctattgttggtgctaccttggaagtgattcagaagaagagagctgagaagcctgaagttcgtgatgctgcaagagaagctgctcttcgcgatatcaaggaaagaatcaagaagacaaaggatgagaagaaggcaaagaaggctgaatttgcttcaaagcaacagaagattcaggctaagatcccaaggctgct

SEQ ID NO: 8160 - DNA, 739 bp, Glycine max
agtcgcagtgactcccctttgcttccgcctccacagcccccactttccaacttagggttctagggtttctccagcagcgccggcgcctccacccgcccacccaaccaccatgacggccgagaccgcgacgcaggcggagctgctccgcgccgttctggaagagcagaagctcgctgcgcagggagacgagcccgtagttgaggatgatgatgatgaggaagatgaggatgatgatgacgaggatgacaaagatgatgatgttgagggagttgatgcaagtggaagatctaagcagagtaggagtgagaagaagagcaggaaggccatgctgaagcttggcatgaagactatcactggcgtgagccgtgtaactgtcaagaagagcaagaatatcctgtttgtcatctccaagccagatgtattcaagagccctgcctctgacacctatgtcattttcggtgaggctaagattgaggatctgagctcacagctgcagtcccaggccgccgagcaattcaaggcgcctgatcttagcagcgtcatctcaaaccctgaggcttctacagctgttcaggaggatgacgaggattgtgatgagactggggttgagccgaaggacattgagctggtgatgacccaggccggtgtgcctaggcccaaggctgtgaaggcgctcaagtctgctgacggtgacatagtcagtgctatcatggaactgacgaactagccgtgcccagcc

SEQ ID NO: 8161 - DNA, 541 bp, Glycine max
agtttcaagcaaattagcacaccgccgcaaagatgcagatctttgtgaaaacccttacgggaaaaacaatcaccctcgaggtcgagtcctccgacaccatcgacaatgtcaaggccaagatccaggacaaggaaggcatccctcccgaccagcagcgactgattttcgccgggaagcagctcgaagacggccgcacgctcgccgactacaacatccagaaggagtcgacgcttcatctcgtcctccgtctccgtggtggcgcgaagaagaggaagaagaagacgtacaccaagcccaagaagatcaagcacaagcacaagaaggtgaagctcgccgtactccagttctataaggtcgatgggtccggcaaggtgcagaggctgaggaaggagtgtcctaacgcgacttgcggtgcggggactttcatggcgagtcacttcgatcgtcactactgtggtaagtgtgggcttacctatgtttaccagaaggagggtgccgaggcatgatctattgaaccggtagattgatctctctctctctc

SEQ ID NO: 8162 - DNA, 533 bp, Glycine max
actgtctcgacgccgaatcccgatatttatttttcttgcgttccggtccccaggcttggagttatttcctagtctggtgctcgctcgtctcgcgcggcggcggcggagggtttgcgtcggcgctcttgcgagctagggtttcgggtcgaggaagagcgagatggaggaggtgacggagggggtcaagaacctggccgtgacggagccgcacaagaagaaccggatccaggtctccaacacgaagaagccgctcttcttctatgtcaacctcgccaagaggtacatgcagatgcataacgaggtggaactctccgccctcggcatggctatcgccactgtggtgacagttgccgaaattctgaaaaataacggccttgctgttgagaagaagatcatgacatccactgttgatgtcaatgatgaatcaaggggccgccccatgcagaaggccaagattgagatagtgctgggcaagactgagaacttcgacgagctgatggctgctgccgcggaggagagggaagtcgcagctg

SEQ ID NO: 8163 - DNA, 784 bp, Glycine max
gagctgtgctaagaagaagaaaagcacgttggcacttccccttcttcgaatccccggcatgccactcaccaaccaacaccaatcattcccttccaatacccgccgcaaagccacgacggcgaaggcggagctcgggacggcggtggcgcggacgggcggagccggttaccagtctccgtccgtcgacgttcccacgcataaggtcacagtccacgacagacaacgaggaatcgttcacgagttcgtcgtgcctgaggaccagtatatattacatactgctgaggcccagaatattacccttccattcgcctgcaggcatggttgttgtactagctgtgctgtacgtataaagaagggacaaattaggcaaccagaggcacttgggatatctgccgaattgagagacaagggttatgcacttctttgtgtgggcttcccgacctctgatgttgaagtggaaactcaagatgaagatgaggtatattggcttcaatttggacgttattttgcccgaggaccagtggaaagagatgactatgccttggagttggccatggctgacgagtaagcaatgtagaaaatctgacaattattggagcaaagaatgtgaatattttgtttccccttcttttcttcttctcatatatctaccatgttatcttcttgtcttggtttatttttccctatatatactattgtgctaattccaagcaaagccccatgctatatgcctatactcctatcttttttcctatttggtatggtatacaaggtgtgggtaatt

SEQ ID NO: 8164 - DNA, 832 bp, Glycine max
gagctgtgctaagaagaagaaaacccccgcccgcggtccggatggcacttccccttcttcgaatccccggcatgccactcaccaaccaacaccaatcattcccttccaatacccgccgcaaagccacgacggcgaaggcggagctcgggacggcggtggcgcggacgggcggagccggttaccaatctccgtccgtcgacgttcccacgcataaggtcacagtccacgacagacaacgaggaatcgttcacgagttcgtcgtgcctgaggaccagtatatattacatactgctgaggcccagaatattacccttccattcgcctgcaggcatggttgttgtactagctgtgctgtacgtataaagaagggacaaattaggcaaccagaggcacttgggatatctgccgaattgagagacaagggttatgcacttctttgtgtgggcttcccgacctctgatgttgaagtggaaactcaagatgaagatgaggtatattggcttcaatttggacgttattttgcccgaggaccagtggaaagagatgactatgccttggagttggccatggctgacgagtaagcaatgcgagcaaagaatgtgaatattttgtttccccttcttttctccttttttttcttcttcatatatctactatgttatctggtctttgtttatttttcccatctatatatactattgtgtgaattctaagtaaagcctcatgctatatgcgggttcgtgtttaaatgtttcaaagctttaggggagtatattgaaagattaatttaatgtaatttgttcatcttaaaaaaaaaaaaaaaaaaaaaaaa

SEQ ID NO: 8165 - DNA, 1690 bp, Glycine max
tttttatctctaacataggtagatagttaaaatgcaactagatttacacagaattcaaattatctaaactactaaagataaaatctaagtaatagagccacaaattcattggatgattccttttccagttttccggatatatgcacaaaaattgttcctcgaaaaagttgtggctagaattgttacattgaattaaaataataggaaaagaagaggctccagttaggcaattaggctttggtcccatccaatcgcaaccaggaaatggatgtggttccttatccagtaacacccccaaacctcatttctctgccacatgaaccctcccaaacacagaaaccatagcaaaaagaaacccagattattgattattaataatggaagccatattcgtcaccaaacccgcttcccattctctcctcttaactaaactctctccgaatcccaaacacttgttccctccacaccaacaatcctttcacaacatccgccacaaacccacgcgcttccgccccgtcatcgctgttttccaaaaccaacatcaacaagatgcagctgcagcttccaaccacaccgaagatgagtcctacggcgaagtcaaaggcatcattggaagcagagccttggaagccgccaccggaatggagtacctcatcgagtggaacgacggccacgcgccgtcctgggttcccgccgacttcatagccaaagacgtcgtcgccgagtacgaaactccctggtggactgccgccaagaaagccgacgagtccgcgttgaaaaacttaatcgaatccgacgacggccgcgacgtcgacgccgttgacgccgacggccgcactgcgctcctcttcgtcgccggactcggctcggagtcctgcgtgaagctgctagcggaggccggcgctaatctggaccaccgagaccggagcggcggcctcgcggctctgcacatggcggcggggtacgtcaggcccggcgtggcgaaggttctcttggatctcggcgcggatcccgaggtggcggacgaccgcgggagaacggcgttggatctggcgagggagattctgaaggtgacgccgaaggggaatccgatgcagttcggacgcaggattggactggaaggtgtgattagggttttggaaggggcagtgttcgagtacgcggaggtgcaggagattctggaacggagaggaaagggtgagaatttggagtatcttgtgcggtggaaggacggtggtgccaacgagtgggtgaaggcgaagtttgtggcggaggatttggtgaaagactacgaggctggcctcgagtacgccgtcgctgaggcggtgctcgcgaaaagggtagcggatgaagggacgccggagtttttggttaaatgggccgatttggaggagcccacatgggagcccgaggagaatgtggacccagagcttgtcaaagctttcgagggaagtaacaaccaggcccagcccagtagtaatgggcccgctgtggtcttttccaatcaggatagccctagcctgtgatttttcatagtttgtttggactgggattttgttgcaaaatttcgggagcaaattaattaataattgttttgtaccaaatcaagttgtggacatgaaaaagctaatcaaatccaatacatattttcctcctggttttagatcgtactttgaatgttttagggaag

SEQ ID NO: 8166 - DNA, 853 bp, Glycine max
atctacaccattggttcaagaaactaccaagtagcaagcttgattattattatcatcacatagagcttctgaaaatgtgcaaaggtgcagaaggagaaaagcaacatggtttctgcagcagctttctacataaagagagtgcaaccagaagtgctatatgttgtgagctatgtgggttacaggcttcattgtattgccaagctgatgatgcctacttgtgtaaaaaatgcgataaacgggttcatgaagctaattttttggcccttaggcacattaggtgctttctgtgcaacacatgtcagaaccttacgcgaagatatctcattggagcatcactagaggtggttcttccggccaatataaactggaccattagaaatctccttaacaacagaggaatctacagaaagtgttcaagaatgcataacagcccttccctctttttataacttccatctttctttattctccgtagaagatcttttgtaatagaaaaggttagtgagtaccatctcaggtatataggaaactgctaaatgtttttattatcatgatttttaaaaaaaaatggttggtaatacaaccatgttcaatagaaggagggaatgtccaatgttttttttttctttaatttctggtagatgtagttaattgaaatttgacttctatggttatttttattttaagccaattccaaagcaggagaacgaatttctggcagaagttatactatgttagcagatatacaatatgtcttacaagtgtatgtcatggtaattcctggcatctcatattataacctatatcaataacaattataatggctgatacttactttttgtgtccaaaaacc

SEQ ID NO: 8167 - DNA, 1767 bp, Glycine max
tacggctgcgagaagacgacagaccgcgaagagtgaaactgccaaaaagtgaggccaccccaaaaacaaagtgagattataggaaacaaaaatttctttgcttaatactagttcctcctttctcctagcctggtagtcttttgaaaattctttatcttgatcacataattttcattttgaacttgaagaaagttttagtgtatttttttttccttaaagaaacagaacatatcctgttctttctttctctgtttgcatttttgttcacttctttctttctttctttctttcttattatctagttaagcatgacaacatttatggacatgtacaacactactagtagcatcatgacaccggatttcttagaccagtgtagtgatcaagagctgatgaaagcacttgagccttttatgaaaagtgattcatctagcactacttcctcatcaataacaacatacccttcattctcttctttttcttcttctcccaacttgtcctcaacaacatggagcacccaattttgctcctcaagctaccaccaaaagggtccaactccaacccaagctagttccttcaaactgaaccaactcaccccatcacaaatatttcaaattcaaacccaaatccaggttccacgagcccaggttctcagcccaaagcccattaccatgaagcacgtgcgggcttcttgttctaattcaaaggccacgaagctttaccgtggggtgaggcagagacactggggcaagtgggtcgctgagatcagactccctaagaaccgcacacgtctctggctcggtacatttgaaaccgcagaggaagcagctttggcttacgacaacgcagcgtttaagctaagaggagaaaacgcgaggctcaacttccctcacctacgtcaccatggagcgcgtgtgtacggtgagtttgggaactacaagcctctcccttctgcggttgatgcgaagctccaagccatttgtcaaagcttagggaccaaattgcagaaactgaaaactgatcaaaaccctgttgtagatgcaaaggttaagaagacatcggagttcgaggattttaagattgagaaccaaacatcatcatcctcggcgttgtcggatgaatattcttcttcttcttcttcgcccgaatccgatattactttcttggatttctcggattcttgtgaaacaacatgcaatcttgggttggacttggaaaagtacccttccgtggagattgattgggcagctttatctgagtcatgaatgatgttagtggttttgtctttgttgaacggtttaatgatttgatgtgttttaggtttttttttcatgtgtcttgggcagcagctgcaacgaaattttttaccgttgaagcagttgctatgctgagtcaggttgctaactttagtgtactgctgtagatggatgggtcacagcggtttggttattatggttttcttggtctgctggtattttttattcctgcatgaccaagctagcttcaactcttttttttctttttaaattgatagaaaacaaggtagcttcaactacttgtttgcagttcgaatgtaatttaagtgccttaatgcaagttttggaagttcttgtaaaacacagggcatgtgacagtccttggccccgagggccaattatttaattgaaatttgaaatataatgatcgtgtaatgattttttacacaatcaattaatcattgttatattttttaaaatattgattttattaataatttttaaaaaaaaa

SEQ ID NO: 8168 - DNA, 1340 bp, Glycine max
aaagcctacgtgcaaaaattaaggtcaacaattgtggtttctatccaataatttgtgacattgtacacaaacaatatccatggcctctgcagcttccatttcctcatcacaaccagaagcaccaaaggttcatgcatctgatatttctagcatcaaagcctttgcagaatcaaagggagcctctctgatcccttacacctaccactccatcacagagcaccatgatgatgatgtagcagatgagcttgctgcttccatcccagtcatcgacttgtctctcctcacttcgcatgaccctcaaatccacgccaaagccgtgcaccaactcggcaaggcctgtgcagagtggagtttcttcatgctcacaaatcatggaattcccgagagcctggtggaggagttgatgaaaaagtctcgcgagtttcatgatttgccgatggaagaaaagaaggagtttggtaataaaggaccctttgaaccgatcaggcatggcaccagcttctgtccagaagcagagaatgttcattattggagagattatctcaaggccatcacgtttcctgaattcaacttcccctacaagccaccaggttacagggaagttgcttatgattacagcaaaaaaatcagaggtgtgacaaggaagttgcttgaaggaatatcagagagtttgggattagaatccaattccataatcgagtccactgattttgactctggccatcagctgtttgttgtgaacctgtatccaccatgtccacaaccgcaccttgctctggggctgccttctcattctgacgtaggtttattgaccttgctcacgcagaatggaattggagggcttcaggttaagcacaatggcaaatgggtcaatgtcaatccccttcccaactgcctaattgttttgctttcagatcaactcgaggttgtgagtaatgggaagtacgctagggtgatgcaccgagcaatactcaacaatgcagacactaggatcagtgttgtgctggcgaatggacctgcgctagataaggaaattggacctttgccggagctactgcagaattataagccattgttcagaagcattaaataccgagattacttccaaattcagcagaagtcacgattacaagataaaagtagcttggatgagattcgccttaactaatgctcaacaatgatatgatactcatatatatctatctgtgctgttgcttaatttgaacaacacgggatggaaagttggtatgtattgagtgatgataaattgataatgttcctggattaggcgtgtgttcattgatatgagatatgattacatttcaaaaaaaaaaaaaaaa

SEQ ID NO: 8169 - DNA, 2321 bp, Glycine max
gacttaataattagtcttgtgtgtctaacgggtgtgtcccctttctcccattcttcacatcattagaatgccggcttggtggaatagaaagtggagcaagagcaaggaggaggatgaggaggatgagccacgtgccggttttcacttgaattttatgaaatctccggtttctgttacatcgtctaagagcaagagtaagaccacgacgccgacgccgatgaagaagaagaagaagcccaagagcttcgacgagaaggtggagggtgttcccttgcctcgtccggcgcatagtcacgccgatcctcttggatctgtttcggtgtcggggggttccagcgtcagctcctccacctccttcgacgatcatccaatttcgtctcccaacaccaaccccaaccccaacagaggacatgatgaggttagggtcaatgtaaggtcaaaaagtccgggtcctgggtcaagaggacctaccagtcctacctcaccgcttcatcaaaggttgaataatttgagccttgactctcctacggggagtcagtgtcatccattacctcttccacctggctctccaactagtccttcttctgtgctttccaacgcacgagcaaatgcacatttggaaaatgctactagcaatgtgtccaagtggagaaaaggaaagcttctaggacggggaacatttgggcatgtatatctgggattcaatagtgaaaatggacaaatgtgtgcaataaaagaggtcaaggttgtctctgatgatcaaacatcaaaagagtgcctcaaacaacttaaccaggagataaatttgctaaatcagctttcacaccctaatattgttcaataccatgggagtgaactggtagaagaatcactttctgtatatttggaatatgtctctggtggttctatccataaattacttcaggagtatggttcatttaaggagcctgttattcaaaattataccagacagattgtctctggacttgcctatctgcatggaagaaatacagtacacagggatattaaaggggcgaacatactagttgatcctaatggtgaaatcaaactggcagactttggaatggctaaacatataaattcttctgcctcaatgctttcattcaaaggaagtccatactggatggcacctgaggttgtaatgaatacaaatggctatagtcttccagttgatatatggagcttgggatgcacaattattgaaatggcaacatcaaaacctccatggaatcagtatgaaggggtagctgccatatttaaaattgggaacagcaaagatatgcctgaaatccccgagcatctttcgaacgatgcaaaaaatttcatcaagctatgcttacaaagagacccattagctcgcccgacagcccataagttactagaccaccccttcattcgagatcaatcggcaacaaaagctgcaaatgtcagcataaccagagatgcttttccttgcatgtttgatggaagccggacaccgcctgtgttagagtcccattccaaccgaacaagtataacttctcttgatggagattttgcatcaaagccagctcttgcagcaccacgagcattaaggagtcctagagataacacaagaatgatcacatctttaccagtatctccctcttcaagtccattgcgacggtatgggccaacgcatcagagctgttttttctctcctcctcatccagcttacacaataatgggacaaagtagttacactttgaatgacatatcatcatatccaatgacatcaaatgccacgtttgctcttgatccttggcatgaaacatctcgatacagagccaatacaccacctggtggatctccaagaatgagactcatttgagttgagattgtaaatagctatagaactaaaatatttccacgtctccccagcatacctcgtggtctgtggttgaacttcaatctggactctgaaacacaaactatcctaaatattctgcgggtccattctttatacttgagaaccagatgacggaagaaatgattctggccctatgctctcggtgcattgcattggggagaccatgctgcttgtaacaatttcttgattattgtaaatgcaatgtgctcactgtgtttgtagtaacaattatgttgtataatgatagttcatggcaggataaaaaataaaaataaaaagtaatttttatagccactctttccattttgaatcagaaattctatttgagattagatagggaagggaaatctatcagagccggcctattagcgaggggttagaatagtttgtacaagatttcgttaccattttt

SEQ ID NO: 8170 - DNA, 2192 bp, Glycine max
  misc_feature (1505)..(1505): n is a, c, g, or t
  misc_feature (1706)..(1706): n is a, c, g, or t
  misc_feature (2115)..(2116): n is a, c, g, or t
  misc_feature (2180)..(2180): n is a, c, g, or t
  misc_feature (2184)..(2186): n is a, c, g, or t
ccaccccttccgaccggttgcaagaggataacagaagggggaccaaaaccttagtagtctctcagctcctccttcttcttcttcttgttcctttgtgcttagtccagtaattcagaacatgcccacttggtggggtaaaaagtccagcaagaccaaggaccaacagcaccaacaacaacaagaccaccctcatggcgccgccgccaccaccaccctccttcacttcaattttatcaagcccaagcccacccccaagcccagcaagagcttcgacgacgtcgtgagaaactcccctcgtgccagccgcgatttcggttcctccgccgccgtcgaccaaggtcttcccttgcctcgcccctccgtcttctccacccaaagcttcgccatcgaccaaggccttgtttttggatctgcctctgtttccggctccagcgtcagctccagtggctcctacgatgatcaccctcagattaatgcctccagagggcaaggtgacatgaagttccttgtgaggtctaaaagcccgggtcctgggtcaagagggcccaccagcccaacatcacctctgcatccaaagttgcttggtttgagtcttgactcccctacaggcaggcaagaaggtgaatgtcatccattgcctcttccgccaggttctcctaccagtccttcttcttctcttcccagcatgagagcaaatggaatgacggaacacactaccagtaacctttccaagtggaagaaaggaaagcttcttggtcggggaacatttgggcatgtttacctgggattcaatagtgatagtggacaattgtgcgcaataaaagaagtcagggttgtctgtgatgaccaatcatcaaaagagtgcctcaaacaacttaatcaggagatccatttgctcagtcagctttcacatccaaacattgttcaatactatgggagtgatttgggagaagaaacactttccgtttatttggaatatgtctctggtggttctattcataaattacttcaggaatatggggccttcaaggagcctgttattcaaaattataccaggcagattgtctctggactttcctatcttcatgggagaaatacagtacatagggatatcaaaggggctaacatactagttgatcctaatggtgaaatcaagctggcagactttggaatggctaaacatataaattcttcttcctccatgctttctttcaaagggagtccatactggatggcacccgaggttgtaatgaatacaaatggctatagtcttcctgttgatatatggagtttgggatgcacaattcttgaaatggcaacatcaaagcctccctggaatcagtatgaaggggtagctgccatatttaaaattgggaacagcaaagatatgcctgaaatccccgagcatctttcgaatgatgcaaaaaaattcatcaagctatgcttacaaagagacccattagctcgcccgacagcccaaaagttactagaccaccccttcattncgagatcaatcagcaacaaaagctgcaaatgtcagcataaccagagatgctttcccttgcatgtttgatggaagccggacaccgcctgtgttagagtcccattccaaccgaacaagcataacttctcttgatggagattatgcatcaaagccagctcttgcagcaccacgtgcattaaggagttcaagagttaacacaagnaatcatcacatctttaccagtatctccctcttcaagtccattgcgaagatcctcatatccaatgacatcaaatgccacgtttgctcttgatcctgggcatgaaacatctcgatacagagccaatacaccacctggtggatctccaagaatgagactaatttaagttaagattgtaaatagctatagaaccaaaatatttccacatctccccagtataccttgtggtctttccctctgaggttgaacttcaatttggactctgaagcacaaaccatccaaaatattctgctggtccattctttatacaagagaaccatatacacgagaaccagatgacggaagaaatgattctggccctatgctctcggtgcattggattggggagaccatatttgcttgtaacaatttnnttgattattgtaaatgcaatgtgcttactgggtttgtagtaacgtttatgttgtataatgatangtcnnngcagaa

SEQ ID NO: 8171 - DNA, 1448 bp, Glycine max
tcagctacgtaggccccccccccttcaccatcccggattctccctgccactacaaattcccaacttcgcaaaccctaggcagcagcagcagcagcaacaacaacagcaacgaagaattcgaagagaaatcaaatcgaatctcatttgatctgtgtgtggttgcggcggcggcaatggcggagcacttggcatcgatattcgggacggagaaggacagggtgaactgcccgttctacttcaagatcggcgcgtgcaggcacggcgaccggtgctcgcgtctccacacgaagccgagcataagccccactattctcctctccaacatgtaccagcgccctgacatgatcacccccggcgtcgacgcccacggccaccccatcgaccctcgcaaaatccaggaccacttcgaggagttctacgaagacctcttcgacgagctctccaagtacggtgatatcgaaagcctcaatgtctgcgacaacctcgccgaccacatggtggggaatgtgtacgttcagttcagagaggaggagcatgccgctaatgctgttaggaacctcactggaaggttttatgcaggtcggccaattattgttgatttttcgccggtgacggatttccgagaagctacttgcaggcagtatgaggagaatacttgcaaccgtggtggttattgcaacttcatgcacttgaagagaattagcagggaattgaggcgtcagttgtttgggaagtcccatggaaggcacagcagaagcagaagcaggagtccttacaggcatcgaagccatgaggagcggtctcatcgaagtcatagcagaaagtatgatgacagggaccaccatcatgagagtcgcagcaggagacacaggagcacaagtcctagacataggagaggacgaagtcgcagccgaagtcctggagggaggaggcaccatagtccggttagagatggcagtgaggagagacgtgccagaattgagcaatggaacagggagagggaagaccaagaacctgggtataaggttaatgctgaggaaatcaataatggtaatgctagcaaacatcatgggcatcagcagcaggagcaggaaccgcaatcacctcaggagggacaatgatctgtttatgttgtaatggttcatggcttgctctttgaggatgttttaacggatctttcagctggcaagtaatcgtgtttgtaggagaagccttggctggtttacttgctgcatttgtgcaggctctgaggaagatggcttcatttttataattttatttagttttctttttcctggcatattaggattttttagtgtgtaaaccttcgaacccaattgtgcgcttgtaaaattgttactttgaggaagcagcttttgaacgtttaatacattatcgacgtgcatgcatttccttgaaaaaaaaaaaacaaaaaaaaaaaaaaaaaa

SEQ ID NO: 8172 - DNA, 1314 bp, Glycine max
  misc_feature (1303)..(1303): n is a, c, g, or t
ttacggctgcggctacgtgaacccccccggaggaaaggaaaggggaacccaaaccgaaaccctaaccctaacggagagatggcggagcacttggcatcgatattcgggacggagaaggacagggtgaactgtccgttctacttcaagatcggcgcgtgcaggcacggcgaccggtgctcccggcttcacaccaagccgacaattagcccaacattggttctgtcgaacatgtaccagaggcccgacatgaacatgagcattatcaccaaccccgatcagccacaaccccaatcccttgaccccgacaaggtgcaggatcacttcgacgacttctacgaagatctcttcgaggagctcagcaagtacggccccattcagagcttgaatatttgtgacaacctcgccgatcacatggttgggaatgtgtatgttcagtttagggaggaagatcatgctgccaacgccctcatgaatctcactgggaggttttattcaggtcgtcccatcattgttgacttctctcccgttacggattttcgagaagctacttgtaggcagtatgaggaaaatgtatgcaatagaggtggctattgcaacttcatgcacctaaagaagattagcagggatttgagaaggaaattatttggaagaaataggcgatggaatggccgcagtggaagcagaagcaggagccctccaaggaatcgtaaccatggggagaattcacattctggtcgtggttctggtagaagagattttgacaggtcccatggcccccatggtaggaggcctagaagccgtagtcctcggtatagaggaaaacgaagtagaagtccagtgggcagagataggagtcctccgatcagagaaagtagtgcagaaaggagagctaaaatagagcaatggaacagggagaaggaacaaggggacactggtaacatgaacaattcgaaaagcagtgatgattatcaagaacagagtgttgcacaaaatggtagtgaatctggtaaccatcagatatagcaacaacaacgtaatgatttggcccaaaatctgctagtaagtgtggcaagtaatctgatttgtgttgtttgcacctgcatttagatggattcagttgccattgttattattctatttggaattgtcaatttagtgatagaactttgtaatatccacagcaacaacattttaattttctgcttcaattgtaatgtcctgcaaggtaggaaggaaaatggaaaatgaagcgatacatttgataaagttcagctatgaatgtttcatattttgttatcgagcnaaaaaaaacaa

SEQ ID NO: 8173 - DNA, 1729 bp, Glycine max
ttcctgctgaaatatgtccatagataacatgtcttttccctttctaatgggaatgcttccacaagggtcaaatggattatgcatccctcctagctaacaaacatttggatggtaccctccttaaccaggtcaggatgcatcaaggaactaataatgatcattttgtggatttgtctagtggctgggaccatcattgtttataccggttgggaaaattatgcacaccaaccttcttcctccaattatgacagacaaacatttaatgttgatgggcggcgtgattgatcttacaatgggggaaggtggacaagggcatcacaagcgtaagagccctggaattccttcagtctatgaggcaggcagtactagtagatactttaatgctgggagttcaactgatcttcctatatcttcagaattgtggcaggagaagccaaatattgattgtcaatatattccctgggatcattattggactatgacacccacattgagaggtactggcctttcaataaagggtgagggttctttgcggaatgtgaggagccgatctacacttgatttggattccaatctggctagctcgagccgatcaagtaatcattcacacaattcctaccctactgtcccaccagttgaccattctagcacggtggatctttctggtcagacttctgttacattgacaagggattggagccaaatgaacatatctccagctaatggaagggtgttattatcagatacaggtgcttttggtcttgaaacaagtcacttccttgttggaagtggtgctactgctagcaatgctgcttctgtagatgttgggggattccatcatgaatttggtacaagcagaaatcctactgctcctcaaagttttcataatactcaaactcagactgctaggggaattagaagcaactattctcagagatccacaccaacttttagggcttcttcaagcttgcgcttgggacaagtgacatctgatgatggattgcctatggtagctgaaagttactcttctagacttccaaggccattgagcaccattggcaggaggaatggtgatagaaatgggaggtcaagaatttctagtgaaagatatcgatcattggctgagagtggtctgcatgatcgtttttcctctgagggtttcatggttgttgagcgtgcatcagtgtatggttccaggaacatgctagatcagcaccgagacatgaggatggacgtagataacatgagttatgaggaactacttgcacttggtgagaggattggctatgtgaacacaggaatctctgaggattcgcttaacaaatgtttgacggaaacaatatattgttcatctgagcaaagtcaagacgaaggaaactgcgtaatatgtctggaagagtacaagaacatggacgatgttggaacacttaaaacatgtgggcatgactaccatgtgagctgcattaaaaaatggttatctttgaggaaattatgtcctatctgcaaagtatctgctttgcctgaggatacgaaggataaataactactctagtataaaattaatctcattttgtgtttatatttgaacatccctcaaaattgaggaaacatattgcttttggaaatgttgtaacaggaatactgctttatgtcaatgaatttgtttccggcttcgatctcaattacgcgagccttgaaaaaaaaaaaaaaaaaaaaaaaaaaaaaaaac

SEQ ID NO: 8174 - DNA, 1300 bp, Glycine max
gcgagaaaagtagaaaactacactcttgaggtccattctcaatcttattaatatatttttgtgtagatgaagatcaacaagagaaggtgttgttgtgagttgtgttgttatggtaccttccttcaaccacaaaacctctctccctctaccacccattctcttctctctctctctctcccgtcctccatctctcaccttctcaatctcttcaccaccaccatcatcatcattatcttctccaatctctataacctcgaaatccctcaaaacctctccctcaaaccaaatgaaatgacccttttgtgagaacattttttcccccttaagaaaaggtcaaaggctgcaactttttcttaaccaatctcacatttttttatttttcaacgtattttggccaggtttggttttctgggttgtcttggaattcaaaaaagattccaactttgaagatgggtaggggtggaaccgccgcggcggcggcggaggtcgccgaacccggtttaaggccggtttatttcaaagaacagcgatataggggcgtcagaaaaagaccgtggggccggttcgctgccgaaatcagagaccctttgaagaaagccagggtttggctcggaacctttgacaccgccgaggaggcggcgcgtgcctacgacacggcggcgagaaccctccggggaccaaaggcgaagaccaatttccctctttctccgccgttctaccatcccgatccattttccgatcaccggcacttcgccaacaccggcgaagatttccacgatcaccggcgaccaacatccagtggcatgagcagcaccgtagagtccttcagcggcccccgtgctgccgtgccggcgacagcgccggtggccaccggccggagatatccccggacgccacccgttatccccgaggactgccgcagcgactgcgattcgtcgtcctccgtcgttgacgacggcgaaggcgacaacgtggcgtcgtcgttcccgcgagaaccgttgccgtttgatctaaacgcgttgccgttagacgatgctgacgtggcaaccgatgatctgttctgcaccgttctttgcctctgatgagaaaaaatgaaaaaacggaacgaaatgatgtatttggttcgttgacggaattattattatttttttctttcttactctttatcatctacttgaatttttttttatctttctctttttcccccttttttttactatgcggagaaaaatgaaaaagaaaaatgtgattgatgatcagttatgaagattatggtgatatgatcttaatttctgtgaaa

SEQ ID NO: 8175 - DNA, 1134 bp, Glycine max
  misc_feature (1040)..(1040): n is a, c, g, or t
  misc_feature (1105)..(1105): n is a, c, g, or t
ctactcttttgaggtccattctcaatcttgttaatatatgcccacgcgtccgcccacccgtcgaaggtgtcgtcatgctaccttccttcaaccacaaaccctctctccctctaccacccattctcttttctctctctttctttccccctccctctctcacctactcaatctcatcaccaccaccatcatcatcatgatcttctccaatctctataaccttcaatcactcaaaacctcaccattaaaccaaatgagttgacccatttgtgagaacaattctccctaagaaaaggtcaaaggctgcaactttttcttaaccaatctcacaacattttgcaacgttttttctggttcggtttggttttctgggtcgtcttggaattcaaaaaagattccaactttgaagatgggtaggggcggaaccgccgcggcggcggtggagatcgccgaacccggttcaaggccggtttttttcaaagaaccgcgttataggggcgtcagaaaaagaccgtggggccggttcgccgccgaaatcagagaccctttgaagaaagccagggtttggctcggaaccttcgacaccgccgaggaggcggcgcgtgcctatgacacggcggcgagaaccctccgggggccgaaagcaaagaccaatttcccactttctccgccgttctaccaccccgatccgttttccgatcaccggtactttgacggcgctggcgccggcgaagatttccaggatcaccggcgacccacctccagtggtatgagcagcaccgtagaatccttcagcggcccacgcgccgccgtgccggcgaaggcgccggtgattgtcaaccggagatatccccggacgccgcccgtcgttcccgaggactgccgcagcgactgcgactcgtcgtcatccgttgtggacgacggagacggcgacaacgtggcgtcgtcgttccggcgagaaccgttgccgtttgatctaaacgtggtaccgttggacgatgctgacgtggcagccgatgatctggtctgcacccgtctttgcnctctgagagaagaaattgaaaacggcacgaaatgatgtatttgggtttcgttgaaggaaagaatnattaaattttttcctatttttaacctctt

SEQ ID NO: 8176 - DNA, 831 bp, Glycine max
  misc_feature (12)..(12): n is a, c, g, or t
  misc_feature (20)..(20): n is a, c, g, or t
tttttcaaaganccgcgttnaaggggcgtcagaaaaagcccgtggggccggttcgccgccgaaatcagagaccctttgaagaaagccagggtttggctcggaaccttcgacaccgccgaggaggcggcgcgtgcctatgacacggcggcgagaaccctccgggggccgaaagcaaagaccaatttcccactttctccgccgttctaccaccccgatccgttttccgatcaccggtactttgacggcgctggcgccggcgaagatttccaggatcaccggcgacccacctccagtggtatgagcagcaccgtagaatccttcagcggcccacgcgccgccgtgccggcgaaggcgccggtgattgtcaaccggagatatccccggacgccgcccgtcgttcccgaggactgccgcagcgactgcgactcgtcgtcatccgttgtggacgacggagacggcgacaacgtggcgtcgtcgttccggcgagaaccgttgccgtttgatctaaacgtgttaccgttggacgatgctgacgtggcaaccgatgatctgttctgcaccgttctttgcctctgaagagaagaaattgaaaacggcacgaaatgatgtatttggttcgttgaaggaaaggaattattaatttttttctatttttactctttattatctacttgaatatttttttatctttctctttttccccacttattttaactatgcggagaaaaatgaaaaagaaaaatatgattgatgatcagttatgaagattatggtaatatgatcttaatttctgtgaaaagaaaaaattcagggtattgtttcaaaaaaaaa

SEQ ID NO: 8177 - DNA, 1452 bp, Glycine max
  misc_feature (1322)..(1322): n is a, c, g, or t
  misc_feature (1342)..(1342): n is a, c, g, or t
caataaataagttgaattcaattcaagacaccgtcttattcttagctgaaaaccattcattcattgacaaaacaaaacaatggcttctttcaatctctcttattcttcctcaccagccctctcacgtccccgggcaagcaaacacttcaaattcttcaatgatgtgccttttgtccgaatgaattctaaatttccctcaagtgataatgcttttgggagaatcaaagctatgttgatctctggagggggtgaactactttcccatccaaatggcaatgacattgtgataggtacaaatctggttggagatgaatctgttcaaattgaggtacagcctaatggaacactggcagatgacacagggctaacaagcaatgttttctctatggacaacaatgaatttgattcggacagcccctcagcaggttttgcttccattcctgaggcaattgaagacattcgccagggaaagatggtagtggttgtggacgatgaagatcgagaaaatgaaggagacttgataatggcagcacagttggcaacacccgacgcaatggcttttattgtaaagcatggaactggtatagtttgtgtaagcatgaaagaggaagatctggatagattggaacttcctttgatggtgaacagtaaggacaatgatgagaaactctgtacggcattcactgtgacagtggatgctaaacatggtacaaccactggggtgtcagctcacgatagggcaacaacagtcttggcccttgcgtctagagattctactccaggcgatttcaaccggccaggccatattttcccactaaaatacagggaaggtggtgtcttgaagagagctggacatacagaagcttctgctgatcttgctgtacttgctggcttggatccagtggcagttctgtgtgagattgtagatgatgatggttccatggctagactgccaaagcttcgccagtttgcagagcgtgaaaatttaaaaattgtatctattgctgacttaataaggtatgcagttacaattcatggaccatgtaataaaattcattgcatgcatatttatgtttagactctgctttagtgcagatactatacttttttatgtttaagtagtgttaaatatattaaatgagtttgatataggtgtaatttataagcctgaatcctgaatacataatagaactaacttggattctgtggtgctttttgtcgtttgaatcagtcaaacataatgattgttttattaaatattcttttggtgaaccttttactgattatataaatttgtatattattaagaaaatggaaagctnttttatttcgaaaaatcttncatttgataaattctaagtgcttatttaattcttatccattatttttcttcatggtttttgctacttggggtacttgttgcttatttaatatatatagcagggagattac

SEQ ID NO: 8178 - DNA, 1190 bp, Glycine max
ggctcgagcacgaacaagggtgtgttctgagtcagcttcggcaacggttcctagcggcagcaccaaacaagtcgagtcgacgcaagctgcattgctttctcaatataaataagtttaattcgagacgtcatcttactctcacctgaaaaccattcattcattgatcaaactcccaaaacaatggcttctttcaatctctcttattcttcctcaccagccctctcatgtccccgggcgagcaaacaattcaaattattcaatgatgtgccttttgtccgaatgaattctaaatttccctcaagtgacaatgctattgggagaattaaagctaagttgatctctggagggggtgatctactttcctatccaaatggcaatggcattgtgataggtaaaaatctggttggtgatgaatctgttcgaattgaggtacagccgaatagaacactggcagcagacacagggctaacaagcaatgttttctctattgacaacgatgaatttgatttggacagccccacagcaggttttgcttccatttctgaggcaattgaagacattcgccagggaaagatggtagtggttgtggacgatgaagatcgagaaaatgaaggagacttgataatggcagcacagttggcaacacccgaggcaatggcttttattgaaaacatggaactggtatagtttgtgtaagcatgaaagaggaagatctggatagattggaacttcctttgatggtgaacagtaaggccaatgatgagaaactccgtacagcattcactgtgacagtggtatgtactacttttcttccatgaatcatcacatgtggagttagtgcaatatctttctgaaggtcttccattgttatcaatctgcatatatacaatttgggttctctaggtctagaccaacttttgctataatcaaaggggaccgactatcccctagaaaggtgcaaacacagttttataaagatcaaacatttgtcttgatatttgcaaatcacttatcaccttctataaatagaagaatccaaagtttgagggtaagagacaaggaaataattgtaattctcaaaagagagaaaagaaaaagagatacctctgatgatgaacatagtttgaaaggcaactttgtactgttatccaactatatagtggagattatttttttggattaaaaggagg

SEQ ID NO: 8179 - DNA, 1876 bp, Glycine max
attaacttgtcgggttccacattctaagatccaaaatgttccgaagattgcagaaccacagccaggaaaactctaatctaatttgacgccaactttcatccaattggaatattattaaatctctttttaagatttcacatttgattcttctcaatttttatctgcgattctcgctttgtacctttgttttgttttcttttgttttcaatatattttaattttaattttccaggaaaaaaaattattttagtttattgttttagtcttgggtcaattttcactgtctcctgatgatcattttaccatgtggggtgagttaatttgagagtgtcgtgcgctgatttttcttcttaaaggctcaaagggtcttctgggtttgatcgaacaaaaaaaaaaaaaaaaagagtcttttggttgcttttccccgcttccagatgccagaaaacaggcaggttctgaggaatgctgattctggtgacaacattgaagaagcaattcggcgtttgaaaatcaatgataattgggatagagatgctgcagctcaatctacccaatatccagatcgacccggtgaacctgagtgcttgtattatttgaggactggagcgtgtggttatgggagtaactgtcgctaccatcaccctgctcatatttcaattggtactcattatggtgaagaactccctcagagggcagggcaacctgattgcgagtattttcttaagactgggatgtgcaagtatggatcaacatgtaaatatcatcatccaaaggacaggcgaggtgctgctcccgtgtcattcaatactttaggtcttcccatgcgtcaggaagaaaaatcatgtccctattacatgagaactgggtcttgtaagtttggtgttgcatgcaagtttcatcatccacagtatgcttccctcggagcatacccattggctggtggacctcctactcctacctcaacaattattcctacatcaggtttaccatatgctggagggtttcctgcatggtcagcagtaccaagaatgtcgtatttatctggacaaggccttcaatcatatgtgcctccttttctgccttcttcacaaggtgttatacctgtgcagagctggaacaactacatgggaaatatgaaccctgcaatgccgaacggttttcttggatctaatcttgtttatgactacatgaatctgggcgagccactttttggtgggcaggcaatcaattcagctctcccgaatagaccagatcaaccagaatgtagatactttatgagcactgggacctgcaaatatggatctgattgcaagttccaccacccaaaggaaagaatatctcaatcattaataaatccacttggccttcctgtgagacctgggcaagctgtatgctcttattacagaatctatggaatgtgtaagtttggcccaacatgcaaatttgatcatccagttttgactatccctcagaactatggcttgacctcacctgctatgaatgtacttgatactcctctcaccagggggttatcaaatgtacaaccacctgagacatctccttctaaattaagtgacaagaagcttcagcattctgatgcaaaagctgctacagaagattcatccaaacaagatgatactacattgaattccttcccggcttccgcagagcctttacacaactaaacttcttgaccctgcattctggtgccctgcggagcttttgttttcccccacattttcaggagaagtatatcatacataccatctattcccccccttttcacctgcaattctgtggagttggatagtttgttcagagatttttgtgacaaccactagcttgtggggaatggaaggcattttttgtgttgaat

SEQ ID NO: 8180 - DNA, 801 bp, Glycine max
ctacatgggaaatatgaaccttgcaatgccgaacggttttcttggatctaatcttgtttatgactacatgaatctgggcgagccactttttggtgggcaggcaatcaattcagctctcccgaatagaccagatcaaccagaatgtagatactttatgagcactgggacctgcaaatatggatctgattgcaagttccaccacccaaaggaaagaatatctcaatcattaataaatccacttggccttcctgtgagacctgggcaagctgtatgctcttattacagaatctatggaatgtgcaagtttggcccaacatgcaaatttgatcatccagttttgactatccctcagaactatggcttgacctcacctgctatgaatgtacttgatactcctctcaccagggggttatcaaatgtacaaccacctgagacatctccttctaaattatcaagtgacaacaagcttcagcattctgatgcaaaagctgctacagaagattcatccaaacaagatgatactacatcaaattccttcccggcttctgcagagccattacacgactaaactacttgaagtttgaattttttttctttcttttggacattttatttttccccacattttcaggagaagtatataatacataccatctattccccccttttcacctgcaattctgtggagttggatagtttgttcagaggttgttgtgacaaccactagcttgtggggaatggaaggcattttttgtggtgaataaagtgcaggtagaaagattatcacccttcacgtatttc

SEQ ID NO: 8181 - DNA, 1634 bp, Glycine max
ccagaatctgaagagaatcaatatgcaatgaaatgtattatgagggttcttgccgttgcagatatatctgttgatgttgcatcagctacgtaggccccccccccctctcttcttactgaagtttgcaaaaatccaaaaaatcccattttcaaccactatctctttgagtcggtagccattcttgtgaggcgggcttgtgagagggacccatctcttgtatctgtttttgaagcaagcctttttcctaggcttgaaataatattgaccaatgatgtgactgagtttttaccatacacgtttcagttgcttgctcagcttgttgagttaaacaggccacccatcccaccaatctacatgcagatatttgagcttctattgtcacctgaaacatggaaaaggtcctcaaatgttcctgcacttgtgcgtctgctccaggccttccttcaaaaggcaccgaatgagatcacccaaggggataggctgaccaaagtgcttggaatatttgacacactaatccaagcttcaagcacatctgaacaaggattttatgtgcttaacactgtcattgaaagtcttgagtataatgctattaaaccatatatttctcacatttgggctgcacttttcagagagctccagaaaaggcggacagtaaaactcatcaagtctctcttgatatttatgtctctcttcctgattaagcatggtgctgcaaatgttgttgatactatgtacagtggccccccccccatttttgttgtgattttgaatcagttctggattcctaatcttaagctgattacaggagctatagaactcaaattgactgcagttgcctcaaccagactcatctgtgagtctccagttcttttggatcctgcagcttctgtgtcctggggtaagatggtggacagcatagtcacactcctttctcggccagaagaggatagagttcaggaggaacctgacatgccagatataacagaaaatgcgggttatagcaccacctttgttcttctttataatgctggaaagaaagaagaagatccacttaaagatataagagatcccaaggagttttttgtggcatcattgtcccgactttctgcactttcgcctgggaggtatcctaaggtcatcagtgaaaatgttgatcctgcaaatcaagcagcattgcttcagctttgcaacacttacaatctttcaatagtttgagattgaatgctggaatacaatgaggaattactgtccgggtcctcagccttcttcaacatttatgagctagctaaaggtacttcttgcattgaaacaaggaggttttagtggctattatcatcatccatttttgtcagtgccatgaatgctgaactgaatttcctatcggtcccattttgaacactgtaagcatgtgtcttgaaatgcgatttggtctgttgggatcttaatgtaaattttttcatgcttcttcccattcccattttcctattttcctgctgtttcagcatgcatgcctgtgagcaaattgtaatccatatcttcggtgcagtcatttgtgtaaacttgcattttaaagtaaattttaactcaacactttacgtaattgattgaaatttattggaaacaccctttttgtt

SEQ ID NO: 8182 - DNA, 2735 bp, Glycine max
tttcaatttcccgctgcccagacccctcgaatagttcgatttcaaaatccatggcgagaccttccaagctacactcatcttccgacgaagcgctctccaatgcttcgagttcctccgatgaagaggagcaagtcaacgagcagatcaacgaagaggaagacgaggaggagctcgaggcggtggcgcgccctgccagttctgctgacgacgacgacgaagtcgccggcgacaatccgccggactccgatgaagatccagccgccgatgacgctgacgatgaccaggatggggataatgttgatcccgaaattagcaagcgagagaaggcgagattaaaagaaatgcagaaaatgaagaaacagaagattcaggagatactggatgtacagaatgcggccattgacgctgacatgaacaatagagggaaggggcgtctgaagtatctcttgcagcagactgagctgtttgctcattttgcaaaaggggatcaatcttcgtctcagaagaagtcaaggggaaggggtcgccatgcatccaatttcactgaggaagaagaagatgaagaatacctaaaaggagaagaagatggtctagcaaacacacgtctggtgacacaaccatcatgtatccaagggaaaatgagggattaccagctggctggactaaactggctcatacgattgtatgagaatggaataaatggaattctggctgatgaaatggggcttggtaaaacattgcaaactatatccttattaggttatttgcacgagttccgaggaatcaaaggtcctcatatggtggttgctccaaaatcccgcgtccgcttggaaattggatgaatgagattcggcgcttttgtcctgttcttcgtgcaattaagtttcttggcaaccctgatgaaaggagacatatcagagatgaattgttggttgccgggaagtttgatgtttgtgtcacaagttttgaaatggcaatcaaggagaagtctgctttgcgtcgatttagttggcgctacataattattgatgaagctcatcgaatcaagaatgagaattccttgctgtccaaaacaatgaggctctacagtacaaactatcgtctccttattactggcacaccacttcagaataatcttcatgaactctggtctcttctcaactttcttctgcccgaaatttttagttctgctgaaacttttgatgaatggtttcaaatctctggtgaaaatgaccaacaggaggttgttcaacaattacacaaggtcctccgcccatttctccttcgaaggttgaagtcagatgttgagaaagggttgccaccgaaaaaggaaactattcttaaggtaggcatgtcccaaatgcagaaacagtattatagagcactacttcagaaggatcttgaggttgtaaatgctggtggtgaacggaagcgcctcctgaacatagctatgcaactacgcaaatgttgtaatcatccatatcttttccaaggtgctgaacctggtcctcccttcactacaggagatcatcttattgaaaacgctggtaaaatggttcttttggataagttacttcctaaattgaaagagcgcgattctagggtccttatattttcacagatgactaggctgctagacatactcgaagattatttaatgtttcgtggatatcaatattgtcgcattgatggaaatactggtggggatgatcgagatgcttccattgatgctttcaacaaaccaggaagtgagaaatttgtcttcttgttatcaactcgtgctggaggtcttggtattaatcttgctactgctgatgttgtcattctgtacgatagtgactggaacccacaagttgacttgcaggctcaggatcgtgctcataggattggtcaaaagaaagaagttcaagttttccgattttgtactgagtatacaatagaagagaaagtcattgaaagggcctacaaaaagcttgcacttgatgctctggtgattcagcaagggcgattggctgagcagaagacggtaaataaagatgagttgcttcaaatggttagatttggggctgaaatggttttcagttccaaggatagtacaattacagatgaagatattgatagaattattgctaaaggagaggaggcaactgctgagctagatgccaagatgaagaaatttactgaagatgccatcaaatttaagatggatgacactgccgagttatatgattttgatgatgagaaggatgaaaacagatttgatataaaaaaaattgtgagcgagaactggattgaaccacccaaaagggagcggaagcgcaattactcggagtctgaatacttcaagcaaacaatgcgccaaggtggtcctaccaaaccaaaagagccccgtattcctaggatgccccagttgcatgatttccagtttttcaacacacaaaggttgagtgagctgtatgaaaaggaagtacgctatctcatgcaaacacaccagaggaatcagataaaggattcaatagatgttgatgaaccagaagaggtgggagatccattgacagctgaagagttggaagaaaaggagcgcttgctagaagatggattttcttcatggagccggagggattttaatactttcatttaggcctggcgatatatatggccgaaatgatatccaaagtattgcttctgagatggaatgtaaaactgacgaggtagttgaaagatatgcacaggtc

SEQ ID NO: 8183 - DNA, 448 bp, Glycine max
aaaaaaaaaccttattttcatttttcagattgattacatgatgagttcttcaatcttccttctatgttgtcttctcatattctctttatattccctctcccaacacacgggctactctctagatgctactccaacacggaagttgagcatgccagcccctgtccacgatcacaaaacccagcataaaatgcagggagcagaaaaggcaatggaaagtaccccagcaaacgaagattccatgacaccagattataccagcaacagttacagtccccatgatcttgtctttcatatagattaccatggagtaacaactcatccaactcctaaacatcccaaaccataggctgcaacttaagttttgcatcgcaagatatttatccagatatgtattcttgtttttatcaatatataaatgaaatgcgttgtgggagaaaaaaaaaaaaaa

SEQ ID NO: 8184 - DNA, 1403 bp, Glycine max
tatatgttggtttttcaactacttttagatgctgcagttatgcgatttctcagagcatggacgcatggacatttattgttacgagggttgtattttcccggcgtcgtccctcgcgcccgtgaaaaataggcatgttgcaaagccactagttgccgatggaagtgcaaagtcccatgaattatcccttgcttatgagcatttttcccttcaaaatcttgaacctcctcttgttcttcaggagtttgttaaccatggaggtgttcttttcaaggtttatatagttggtgatgctataaaggtcgttaggcggttttcattacctgatgtaagcaagtgggaactctcgaaagatgctgggatatatcgttttccaagggtttcttgtgctgcagcttctgcagatgatgctgatttggatcctactgttgctgagcttcctccaagacctttactagagaaactggctaaggaacttcgatggcgattgggtcttcgtctattcaacctggatattatccgtgagtatggaacaagaaatcacttttacgtcattgacataaactacttccctggatatggcaaaatgccagaatatgaacatatatttacagacttcctgttgagcttggggcaggggaagtacaagaaaaaataggctaaaataactgtttccagcccttttatttatgtcccccacatgacgtaagcccccttgcctctcagtttgaagctcaaaactatggctgtaggaaagtatcttagaaagcattagtgataataactttttcagttatgctgtgtgatggaagtgccatggaaaactatcaagacttgtgtttcaggaacttcgacctgtacagaacaactgctagtattttattgtgcgggaactttcggctgtccttccaaggtaacaaatgctgttgcaaatcctctgaagttctataagctggtagcttgatgaacgaaggggtcaagtctgcaatttgaaggatttgtcttcgcaccgcagtggatgttaatatgaccgtgttggataagttgacggatttcaaatgtactgacccgttctttgctgtatataaggcataaattcttgacactaggaatctaaagcaaattttcgtcaaagtacatcttttttgtcttgaaatttatttcgtgtttctataattttgttataatgttctctcatcagggaatatgtcgaacaactaaggaaccccttgctcttgcgtattaattataaggagccaattaagcgctcgctcatgtctatagaaattttcctttccgctgtaagtatatggtagaaattatagaagctcaagggaaatgtccaaagtgagataataaaaagttgttttagtcttaatttataaagaaggataaatatatgggga

SEQ ID NO: 8185 - DNA, 3442 bp, Glycine max
cccgcgtccgatgaatactagttatcaggtttggaaaagaaaaaaagaagggaaaaaatgtggacggtgaagtgagattcatgcttgcccacttgcaacctttatttaatcttcctcttttccttctctcaactgtataaaagaaagcgcccccgcctccgtccatttcaaccgacccgccactacccttctctcacaaatctatttccattccattccctcagagagagcaagatcacccttctatagagagaaaacacacacacacacacacaaaacaaaactcttaaagagggtgaagattttttggaacagaataagagtatggcccttacaaaacaaatcttgggttcttcattgctagagaggtccatgtttgttccttcttcttccccttcatcacttctcaaccaaactcggttcttagttcctttggagaacaagagagttgtgagggtgaagagagctgcaaagtttcctgtggcagctataagtgaggatttgatgaagggttcttcttcttctccttcatcatcatcatcttcatcctcttcttcttcttcttcttctgtgtccacagaaaaaccagtgaaattcaaggttagagctgtgatcacagtgaggaacaagatcaaagaggatttcaaagagaccatcgtgaagcatattgatgctcttactgacaggattggaaggaatgttgtccttgaacttgttagcactgagattgatccaaagaccaaatctgcaaagaaaagtaatgaagcagtgctgaaggattggtcaaagaagtccaatcttaaggcagagagagttaattacacggctgaattcataattgactctagttttggggagccaggagctattactgtgacaaacaaacaccagaaagagttcttcttggatagcataaccattgaaggatttgcaagtggaccagttcatttcccctgcaattcatgggtacaatcaagaaaagatcttcctggaaagaggattttcttttccaataagccttatttacccggggatacacctgctgggcttagattattgagggagaaagagctgagaaatcttagaggtgatggcaaaggagttagaaacttatctgacagaatatatgactatgatatatacaatgatttgggaaatccagataaaggaattgaacttgccaggccaaatcttggaggatcagatatgtatccatacccaagacggtgtcgtactggccgcgaaccaagtgatacagatatgtacgcagagagtcgtgtggagaagccattgcctatgtatgtgccaagagatgaacgttttgaggagtctaagcagaacacattcactgtgaagaggctcaaggcagtgctgcataacttgatcccaggtcttaaggctagcctttcttctagcaaccaagacttcaatgaattctcagatgttgatggcctttacagtgaagggttgctcataaagttggggtgggggttgcaagatgacgtgttgaagaaaattccatttgtcagcaaaatccaagagtccagccagggtcttcttaagtatgacactcctaagatcatttccaaggacaaatttgcgtggttgcgagatgacgaatttgcccgccaagcaatagcaggagttaaccctgttaacattgagaagcttcaagttttcccaccagttagcaaactagacccagaaatttatggcccccaagagtctgctcttaaagaagaacatattttgaatcaactcaatggcatgactgtccaagaggcaataaacgaaaataagctgtttatgattgattatcatgatatatatctacctttcttagaagggatcaatgcccttgatggtaggaaatcatatgccacacgcaccatctttttcttgacaccacgtggcactctcaagcctgtggctatagaacttagcctccctcatgctggacctaattcccggtcaaagcgcgtggttacacctcctgttgatgctactactaattggatgtggcagcttgccaaggcccatgtttgctccaatgatgctggggtgcaccaacttgttaaccattggttacgtacacatgccaacttggaaccatttatattggcggctcataggcaattaagtgctatgcatccaattttcaagttgttggacccccacatgaggtacaccttggagatcaatgccttggctagacagagtttgatcaatgctgatggaatcattgaaaattgctttactcctggtcgctatgccatggagattagttctgctgcctacaagaacttttggcgctttgacatggatagcctccctgcagatctcatccgcaggggaatggccgtacctgacccaacacagccacatggtctaaagctcatattggaagactacccttatgcagctgatggaatactaatctggtctgcaatagaagactgggttcgaacctatgtgaaccattactaccctcactcaagccttatatgcaatgacaaagagttacaatcttggtactctgagtcaatcaatgtaggccatgctgatctcaggcatgaaagttggtggccaacattgaacaatagtgaggatcttgtgtccattctttccacattgatttggaatgcatctgcacaacatgctgctctcaactttggccagtacccttatggtggctatgtgcctaatcgtccaccactgatgagaaggttaataccagaagagggtgatccagaatatgcaagtttccatgctgaccctcagaagtattttctgaatgcattgcctagcttgctgcaagccacaaagttcatggctgtggttgacacactctccactcactcacctgatgaggagtacttgggggagaggcaacaaccttcaatttggtctggagacgccgagatcgtcgaggcgttctacgatttctccgccaaggttcgacagatagagaaggtcattgatagcaggaaccttgatcggactctaaggaaccgttgtggtgcaggggtgttgccatatgagttgcttgctcctagctctgaacctggcgttacatgcagaggggtgcccaatagtgtgtccacataactatactaaactaataaataagggagtcactcccacattttgatacgcattaatatatatgtaatggttggcttactatttactaccatggacagtgactctcagtggatgcccattttgtacctagatttaataagttgttatagtatatattggtaacctagggctgtatagactgtatatgaaaatgagtttggtggggttggaggatgtgtgactgtttataaagttattatcacaatttatagttttcttttgcactatgatgtagttctttttttcatcgttgcaaatatttgcatattttagtatgaaataaagttatcaattagat

SEQ ID NO: 8186 - DNA, 1080 bp, Glycine max
accatgataggaactccaataagcaaaagccaattgatacgtgcatatcacaaaaactactcttacacaccaaaaaaatcctctatcaccaaactcacctataccctcaaactcaaggccctatagtccaagcaagtgagtgagtgttacaacttacacagcatggaatatagtcaatatactacttattcagcagaaggtgttgaggcagaaacttacacaagtagctgcaccaccccatcaagatcaaagaagagaaacaacaacaacacaagaaggttcagtgatgaacaaatcaaatcattggagaccatgtttgagtcagagacaaggcttgagcctagaaagaagttgcagcttgcaagagagcttggattgcagccaaggcaagttgctatatggtttcagaacaagagggctagatggaagtcaaagcaacttgagagagactatggcatactccaatccaattataacactttggcttcacgttttgaagctctgaagaaggaaaatcaaacattactaattcagctgcagaagctgaatcatctaatgcagaagccaatggagccaggtcagagatgcacacaagttgaagcagcaaacagcatggacagtgaatcagaaaatggaggcaccatgaaatgtgaagctgagggaaagccaagcccatcaatggaaatatcagaacatttacttggtgttctgtctgatgatgacacaagcataaaggtggaagactttggcctagaagatgaacatggccttctgaattttgctaagcatgttgatggttccttgacttcaccagaagattggaatgcttttgaatccaatgatctattaggccaatcaaccactgatgattaccaatggtgggacttctggtcctgaatgaaacagagcaaccaaaattttgtggaggaaatatttatgcatatgaatgcttcatgtttggttccacgttggcgacttagattcgataactgggtagcaattagttatagcttccacgtttttaaaaaaaaaaaaaaaaaaaaaaaaaaaaaaaaaaaaaaaaaaaaaaaaaaaaaaaaa

SEQ ID NO: 8187 - DNA, 1072 bp, Glycine max
gaaaaaagccttgactaatagtccataccataattttcctctttcctctgtgcctcgcttcttcttgaatccatgcgcatgagtttgaagaattgtgttagcggtgaggtgagatatttcaatatttgataattgatagtatatatatggggaggggaagagtggatttgaagaggatcgagaacaagatcaataggcaagtgacgttctccaagagaaggtctggcttgctgaagaaagcgcgcgagatctctgtgctgtgcgatgctgatgtggctctcatcgtcttctccaccaaaggcaagcttttggactactccaaccaaccttgtacggaaagaattcttgaacggtatgagaggtattcgtatgcggagaggcaacttgttggagatgatcaaccaccaaatgaaaactgggttatagaacatgaaaagctcaaggctagggtggaggtactacagagaaatcaaaggaattttatgggagaagatctggacagcttaaatcttagaggacttcagagtttggagcaacaacttgattccgctctcaaacacattagatcacgaaagaaccaagccatgaatgaatctatttctgagcttcagaaaaaggataggacactccgtgaacacaacaacttgctctccaagaagataaaggataaagagaaggagctggccccacaagagcaagatggactgcaaaataacatggatgtgacctctgtccttgtaactcaaccaccggagtccctgacaattggaggcttcccagaagccaaatgtaatgaagaaactccaacgtcgagtcgacctaaaaccattcttcccccttggatgcctcttcctacaaatgaatagaaagcctgttaactcttgttaaatacgaataccacttgtacaaagactagctatatacatcatcaggggcatttgatggtgactataccacctggattgtaatctctgtgtgacgtttctgactgcattttaatgcagctgcaaggtatattaaatgtactacatataaatataaatgatactgatataaaattgagtttgaaaaa

SEQ ID NO: 8188 - DNA, 1325 bp, Glycine max
tcgagtcagctatgcaggccccccccccaaatctcagctacgtaggcccccccccccatctgattatcttttctccgacaaacaaaacaaaaccaaaccgcaggagaaaaaaaaaagtcactgtccatttttccagtttccaccttctccattttccaataccgttctatcatggcacactaccccttacagcgtcggaatctagcagctccagaatctaaccctacaaccccaaacccagatctcatccaaacctataaaccctctttcttagtaaaacacttgacaaacctaaacttgagtcaaccccacaaaacccgtccaccccaaaaacattctcctcttattgacacccatttgcaggccaaagccatacaagagaaagagagttctgttactgtgcctgtgaagagaacccacaaagagaagccccaaaggcactgtttgaaattggaaaggagggaacttggtgatcataatgataagggcatggtcgaggatgctaaggttgtaaaaggaaaacctaggaatcctcatttggagaaacatgatgttgttgttgttgctgctgctgagagaatgtccgtgtcgtctttggctccgggtgggggtagaaggagatccttctgtggaacacaggctaatttaagagatgtctttgcaatcaatggtgccaaaatggtttcggttgatatgccaccctttatgcagatccatgctgtggattgtgctagaaaggccatagatagcatggagaagttcacatccaaaacccttgcactctccctcaagaaggaatttgatggggtgtatggaccggcatggcactgtattgtggggactagttttgggtcttttgtgacccattctgttggagggtttctatatttctccatggatcaaaaattatacatcctcttatttaagaccgctgtacaaaaagcagcttgaaggaggtgaatgaattctgcattggtcagaactcagaaaagaagatttttggaatacatttttgtcttagaaagaaaaaaaaaaaaaaaaaaaagccttagagtagcagcattcctctgtacattacctctgcttcaaaaagggatcacccactttgtttcggtttaattctactacctaagtgggtctgaagatgttaattaatgcggtgtgtaacaaatagagttaatggaagaaaccaactttacaagccacgtgcaccgattgttgttgtgtatctacatttatctatctttttgactgaaatcaaatttgattgtacaattattagaatttaaatttttaaattatttcacaaaaaaaaaaaaaaaaaa

SEQ ID NO: 8189 - DNA, 1063 bp, Glycine max
ctagaaagtgggaaagacagtgatgtcagttttgaagtgaatggagaaattttcgctgctcataaattggttctagcagctcgctcacctgttttcagggctcaacttttcggtccgatgaaaaatcagaatacccattgtataaaagttgaagacatggaggctccagtctttaaggcattgcttcatgttatatattgggactcactacctgacatgcaagagcttactgggttgagctcaaaatgggctactaccttgatggctcagcatctgctagcagcagctgatcggtatggcttgagagagacttaggcttatgtgtgaagcaagtctctgtgatgatgttgcaataaacacggtcgctacgactctagctttggcagaacagcaccattgtttccaactgaaagcagtctgtctaaaatttgttgcaaggcctgaaaatctcagagctgtgatgcaaactgatggttttgagtacttgaaggaaagttgcccgtctgttttgactgaacttttggagtatgtggctagatttactgagcattcggacttcttgtgcaagcataggaatgaagtgatacttgatggcagtgacgtaaatggaaggcgggtgaagcaaagactatagtgcgaacactgacaagtttctctgtacaaccctctgctccttgttgcatttaaaaatttctgtgagagccatagatagagggagatgctaagcatttataggattagtggcaatttctaattttcttagcttacttcatgtctaggagatgtaaatgtagtttgttttgatgctgttgcaggtctgtctgtgataactttgctcgtaaaacatttgtcttaaaaaagaaagtattgatcactgctatgtcttctttttttctcactacatatttccccgtaagaggtgattccccccaacaaagccgagtgaaacacagatggcgacgtatccgcttggatgagttgttgtatatcaatattatctgggaatacacttgtgataaaatggattagtttgataaaatcaagggatttcattgaaaaaaaa

SEQ ID NO: 8190 - DNA, 699 bp, Glycine max
caagagcttactgggttgagctcaaaatgggctactaccttgatggctcagcatctgctagcagcagctgatcggtatggcttagagagacttaggctcatgtgtgaaacaagtctctgtgaagatgttgcaataaacaccgttgctacgactctagccttggcagaacagcaccattgtttccaactgaaagcagtctgtctgaaatttgttgcaaggcctgaaaatctcagagctgtgatgcaaactgatggttttgagtacttgaaggaaagttgcccatctgttttgactgagcttttggagtatgtggctagatttactgagcattcggacttcttgtgcaagcataggaatgaattgatacttgatggcagcgacgtaaatggaaggcgggtgaagcaaaggctatagtgctaaagtgcaaacactgacaagttctctgtacaaccctctactccttgttgcatttaaaaatttccgtgagagccacagatagagggagatgataagcatttataggattagtggcaatttctaattttttttagcttcatgtctaggagatgtaaatgtagtttgttttttatgctgttgcaggtctgtctggcgtaggtttctgtgataactttgctcttaaaacatttgtcttaaaaaagaaagtattgaccactgctaaaaaaaaaaaaaaaaaaaaaa

SEQ ID NO: 8191 - DNA, 2112 bp, Glycine max
ctccggcgagacagtaagtaacaagcttttcaatttctccgtcgtttggcttccaatggcatcaaataaccactcaccacctctcgagatattagttcgaggaccagaagatttctcgctctggaccggacctcccccccccgtccgcccacccggccgcaagctcgagaaagtgaaatgcatcaacgcgaagttcagcgacgacggatccaagctcatggtgacaaaatcgaactcgctgattagcgtctacgattgcagaatcgccgaagagattagggcttttgaagtccccaatgtcgtcgccgcagctttgtcgcccaatggaacttacttgcagaccttccagaagccttcggcgccgcaggagaagaacgtcacgctgtggagcatcgagaccggtgctgctgttcaccagcagtcacagaagaacatgaccaaagccaattggcctgcgattcagtttagttctgatgaagctactgcgtgtcggttggcaactaatgaggtacaattttttgatactggggatttttcgaaaggagttgtctgtcggttaagagttcccggagttgctgctgctgagctttctagtttaccagggtctcatgtagctgcgcttgtgccagaatccaagggggttcctgctagtgtacagatatttgcttgtggaaatgcgtctcaaagtcaacctgttgctcgacgtagttttttccgatgttcaaccacccaacttaaatggaatcatggctcaactgggcttctagtggtggtgcagtcagatgttgacaaaactaatcagagttactatggagaatcaaagttatgctatctgaccacggatgggatgcatgaaggacttgtgcctcttcggaaagatgggcccattcatgatgctcagtggtcatattctggcttggaatttgctgttgtatatggatttatgcctgctaaagcaactctgttcgacaagaagtgcaatcctctactagagcttggaactggtccttacaacactattcgctggaacccaaaagggaaatttttgtgtttggctggctttggtaacttgcctggtgatatggtattctgggattacattgataagaaacaacttggagccactaaggctgaatggtctgtgactagtgaatggtctccggatgggtgctatttcatgacagctacaacagctccaaggcttcaagttgacaatgggatcaagatttttcactacaatgggtcattgtacttcaagaagatgtttgacaaattgtaccaggttgattggaaaccagagtcacctggtaagtttggtgatattgccgaattaattaagtctctaaatttggtacaacttgaagataaaaaaccatcaggtcaaggaccaccaaagtctacccagacttctacaaaggcctcttctgccaaccccacaacacaaaaacctgctgcatatcgtccaccacatgctaagaatgcatctgctattcaggcagagttgtttggagagactactgcagaaacactgagcaagaatgcattacgaaacaagaaaaagagggaaaaacagaaggagaaaaaggctgcttctgatgccagttcttcatgatggaatcaatgttcttcctgactcgttctaaattgcttttctactactgcactcgcgcacctgaaaatttgaggctttcagattttggtttactggcaactttgggcagttttggtttgctcagattttgacgtgattgaagtcatgttgtaggtttgtgctttcttgagttttcagctgggatataaaaggtgggagaagataaatctctttatcctcatgataaaagaagtatttattgtaagagaagtgaaattatacgttggtcacaaacattattttgtttccggttgggatataaaaggtgagagtagaagataaatgcccctttctcctcccgataaaatatgtattttttgcaagagaaatggaattataagtagggtgcttcacacgcgtgtacgtacatgcacacacgggcataagagtatatggacaagaagtgtagtttctaatacatactgaccaagttcaaaaagaaacaagaaccaaacttaaat

SEQ ID NO: 8192 - DNA, 1657 bp, Glycine max
  misc_feature (1657)..(1657): n is a, c, g, or t
tttgcgagaagacgacagaagggggagggggcttcctagaatagcagagtatagtcccgcgtccggcagcagcagcttgtcgcgtgcgtgcctctccggcgaggccgtaacaatccacaaacaacaagcttttaaatttctccttcgtttcgcttccaatggcatcaaatagccattcaccatctctcgagatattagttcgaggaccagaggatttctcgctctggaccggaccccccttcgcgaacgatcaaccaagcgtcaagctcgagaaagtgaactgcatcaatgcgaagttcagcgacgacggatccaatctcatggtgacgaaatcgaactcgctgattagcgtgtacgattgcagcactgccaaggagattagggtttttgaagtgcccaatgtcgttgctgcggccttgtcacccaaaggaacttacttgcaaaccttccagaagccttcggggccgcaggagaagaatgtaacgctgtggagcatcgagaccggtgctgcggtttaccagcagtcgcagaagaacatgacgaaagccaattggcctgcgattcagtttagttctgatgaagctactgtgtgtcggttggccactaatgaggtacaattttttgatactggggatttttcgaagggagttgtctgtcggttgagagttcagggagttgctgctgctgagctttctagtttaccgggatctcatgtagctgcatttgttccagaatccaaggggattcctgctagtgtacagatatttgcttgtggaaatgcgtctcaaagtcaacctgttgctcgacgtagttttttccgatgttcaaccacccaacttaaatggaatcatggctcaactgggcttctagtggtggtgcagtcagacgttgacaaaactaatcagagttactatggagaatcaaaattatgctatctgaccacggatgggatgcatgaaggacttgtgcctcttcggaaagatgggcccattcatgatgctcagtggtcatattctggcttggaatttgctgttgtatatggatttatgcctgctaaagcaactctgttcgacaagaagtgcaatcctctactagagcttggaactggtccttacaacactattcgctggaacccaaaagggaaatttttgtgtttggctggctttggtaacttgcctggtgatatggtattctgggattacattgataagaaacaacttggagccactaaggctgaatggtctgtgactagtgaatggtctccggatgggtgctatttcatgacagctacaacagctccaaggcttcaagttgacaatgggatcaagatttttcactacaatgggtcattgtacttcaagaagatgtttgacaaattgtaccaggttgattggaaaccagagtcacctggtaagtttggtgatattgccgaattaattaagtctctaaatttggtacaacttgaagataaaaaaccatcaggtcaagaaccacccaagtctacccagacttctacaaaggccttcttctgcccaacccacaacacaaaaaaacttgctgcattatcgtcccaccacatgctaagaaatgcattctgctaattcaggccaaaagttgttttggaaaagactacctgcaagaaaacactgtagcaaan

SEQ ID NO: 8193 - DNA, 1388 bp, Glycine max
tcagctacgtaggcccccccccccccggagtgagaatagccatgtctacttcaaagagcgtcagcagttctagtgaagatgacaatgaacttagaagagggccttggactcttgaagaggataatttgctctcccaatatatttctagtcatggagaagggcgatggaatttgctagctaaacgttcaggattaaagcgaactgggaaaagttgcagattaaggtggctaaattatctaaagccagatgtaaaacggggaaatttaaccccacaagagcaacttataattcttgaactccactcaaagtggggaaacaggtggtcaaaaattgcacaacatttgccaggcagaacagacaatgaaatcaagaactattggagaactaggattcagaaacaagcaagacatttgaaaatttacactgacagcagagagtttcaagaacttgttaggcgtttctggatgcctagattgcttcagaaagcaaaagaatcatcttcttcaaacatgtcaattcaaaaccaggcaattcctatgccttttgattatgtttctcagcatttaactgttgggaccatacctccttggcagggaccttgtatgaatgaagctggtcccacttacatggaccaacatgagcagaactcagactcggaacacaacaatggttcatgcatctccttgtctgagtcagcaaatattccaaaagtgcctcagcattttggacacaccaccatcacccaatttcatgccttgaataccaatgactttggcaccttcacatatgaaggttataatgtaaacaacaatgtctatgagatggacaacttcaaaacgactactacatgggtggctgaggatgcgcaatacccaattggtgattgtcaaatggtaggaagcaattgggtaaacaacgattttgcatgtaacatgtggaacatggatgaactgtggcagtttagcaagttacaaaaataagattttagggttttgttttttttggaataaccaaaagtccaaaactctttctttgatgacgttattattgttatcatgaactgtggattagctaccgaattaattaatacagatggcgattgttttctgtacatctgtcttgtattactctgttcagataagtacttttgtaatttgtattgattgagaaaagtcattaattagtcactagtacaaaacacaaacagttggaaattgagtgctaataaagaattcgtaaatatatagaagtaaacacttttagaaactttggtgcatttgtaggggaaatcggaatgccgaatgcagccactatgatatctaaatgaagagggcccgtgattgaatgaggatgcaattgaagccaataaagatagttcgtttttcagt

SEQ ID NO: 8194 - DNA, 2137 bp, Glycine max
  misc_feature (2114)..(2115): n is a, c, g, or t
  misc_feature (2121)..(2121): n is a, c, g, or t
  misc_feature (2127)..(2128): n is a, c, g, or t
cccttgtttccccccccctaatccaattcagaccacgaaaaaaccaactacatcagctcatggcaacccccaaccccaccagattctcccttgccatggagagaaccgggcaatgggttttctccccagaaatccccaccgatgttattgttgcagttggacaaaccaatttttctctccacaagtttattctggcggcgaagagtaactacgtcagaaaagtgataatggaatcagaggagagtgacctaacaagaatagagatttccgacatacctggaggatcagaagcttttgagaaagcggcgaagttctgttacggcgttaacttcgagatcacggttcacaacgtggcggcgctgcactgcgccgctgtgttcctccagatgaccgacgagtattgcgacggaaacctcgccggaaggacggaggattttctctctcaggtcggcctctccacgctccacagcgccgtcgcggttctcaaatcctgccaaaagattctccccttcgccgccgaggtcaacgtcgttgaccgctgcgttgaggtcatcagctgcaaggcttgcaacgaggcgaattttccgagccagtcgccgccgaactggtggacggaagagctcgccgtgctcgacgtggattccttcgcgaaggtgatcgccgcgatgaagcagcgtggcgcgaagtacctaaccgtcgccggagctttgattacgtacaccgaacgcgcgctgagggagctcgtcagggatcactccggcggcggaagaggaatccggtcaccggaatccggagactccgattcggagtcgaaaagaagcgaacagcgcgagcttctgcaggctatcgttcctctctttccgacggagaaagccgcgtttccgatcaacttcctctgctgcctcttgcggtgtgcgatctacctccgcgcgtcgagcgcgtgcaagcgcgagctggagaagcgcgtgacggagattctcgagcacgtgaccgtcgacgacctcctcgtgctcacgttctcctacgacggcgagaggctcttggatctggacagcgtgaggagaattatctccggttttgtggagagggagaagggcacgacggtgttcaacgccggcgtcaacttcaacgaggacttctccgccgacgatgcagcgcgtggccaaaaccgtcgactcgtacctcgctgagatcgccgcgtacgccgaactctccatctcgaaattcaacggcatcgccatcctcattcccaaaggcgcgagaaaatccgacgacgatctataccgcgccgtcgatatctacctcaaggtgcacccgaacctggacgagatagagaaggagaaagtgtgcagtgtattggacacgttaaaactgtcctacgaggcgcgtgtgcacgcgtcgaagaacaagcgtttgccgctacagatcgtgcttcacgcgctgtactacgaccaactacaaataaggagcggtacggcggcggacaagcaagctgtggtggcggcggcggagaaaaaacagctgcaagctgacgtgtccttggtgagggagaacgaggagctgcggtcggagctgatgaagatgaaaatgttcatttccgatttgcagaagaatgttcacggaacgtcgtcgtctgggagggagaatattgggcccactaaaaagcccacgttcttctcgtccatgtccaagaaactgagcaagttgaacccgttcaagaatgggtctaaggacacgtcacacatcgacgatgcccctgtggacttgaccaagcccagaaagagaaggttctccatttcctagatttgctttccttagtcaattccaagctttgtcaaaaagaattttaaattttttgaagtaattacgttttctctcttgattgttaatttttttcatgaaagtgtcaatttgtaattaagaaaaaagtgagacgtgattggatttcttaaattagatttgttcatatctgtatgttaagatgtatttgatctggatatataggaacatcctagtttcaatatgaattaatgagaattataataaaaatgctttgagtcgtgcttaaaaaaaaaaaaaaaaaaaaaaaaaaaaaaaaaaaaaaaaaaaaaaannaaaaanaaaaannaaaaaaaaa

SEQ ID NO: 8195 - DNA, 1289 bp, Glycine max
  misc_feature (23)..(23): n is a, c, g, or t
ttttttttttttttttcaaatanaatctcctgttttatttatgcatcgtcgaggctggccgacataaagtaaggggctctatcgtaatttccaataaattagggatactttttctaattattctacttttatttttagcccctcttacaatttatccttttgctaacacacccttctgctctccacgttaaatggagttagttcagtttctggttctacagtatatgcaaacaaagcctccaccaatgtcgctgctgccgccgccgaaacctcaccggagctccggtaactcccctggcgacagcattccagactggatctccgaatcaatcaacggcggctccctccgccgcgtcgacctcaactccggcaccaacggctgggcgtcgccgccaggctccgtgttctccctccgctccgaaagttactttcagaaccgccaaaaatgtcccgccggcgactacctcctctcgccggcgggcatggactggctcaaatccgccgcgaaactcgaccacgtgctctcacgcgcggacaaccgcgtgatgcacgcgctgcgaagatgtcaaaccctaggtcgctccctaaagagcttcgtcttcgcggtgaacctccagatcccgggcgcgaaggagcaccacagcgcggtgttctacttcgcgaccgaggaaccggatccggtccgaaccggttcactcttaaaccggttcgtgcacggcgacgacgcgtttcggaaccagcggttcaagctggtgaaccggatcgcgaaggggccgtggatcgtgaagaaggccgtggggagccacagcgcgtgcttgttagggaaagcgttgaattgcgcttactacaaaggttcgaattacctcgaaattgacgtcgatatcggaagcagcgcgatcgcgaacgcgattctgcacctcgcgttggggtgcgtgacgacggtgacgatcgatatggggtttgtggtggaggcacaggcggaggatgagttgccggagcggttgatcggtgcgattagggtttgccagatggagatggcgtcggccacggtggttgaggcgttgcacgtgccgcgcggggttgggtgggccaaggtgaatcatcataagtctgcggatgagcttgctttggatgattagatatttgtttagtgatagtagtacgaagtttatgattttttttatattttaattattcttcaatggattttaatttcttgttcactggatatagtagaaatataaaatttcttaacacctagttgcctattattttgcaacactagaagt

SEQ ID NO: 8196 - DNA, 1391 bp, Glycine max
cagtatataaaggattttttattttatataacctatggttttgcaataatcgaaagcaattgaaattgtcctaaggtaaggtgtttgaatgcttacatacatagattaaggattttaggaccaaagagggagtcatgaatgtgacaaacaaaccaaacccatatggttccaccaatgggtttcagtctctgcttcaacaaaatgggtgggaacagggatcatctagactcagacccactaagctttaccctgcaccaacggctcgctaccaggacattgttcgtgatgcaaacctcttctggggaacgcttcaagcttttcacaaaacacttggcaccaaatataagatttctactgtgggaggaacgccacttgatctacatcgtcttttttgtcgaagttacatctcgcggtgggattgaaaaggtgattgttgatcgtaagtggaaggaagtgattctgaccttcaatttcaaagataccataaccagtgcatcatttgtggtgcgcaaatcctatctatcgatgctttatcactatgagcaagtgtattattttgggaggcaaggcattcctcccccaacacctgatcttatgattagaggccaatcaggccaaccctatagctccacaaccattccagaagttgctgctgtgaatgattcacctgttcagagtactccagtacaggcacatgatgatatggtttctggaacaattgatgcgaaatttgatggtggatatgtagttacagtgattctaggttctgagcagctgaaaggtgtcctgtttcatgttcctgataatgtgtcccagagttctcatgccgaaggcacatctagttcacagaatcttggtgatgacacgtctaatttacagagtcgaaagagagcaaaatatgcaccacgtgatccatttcggccaaagtcaaacaggagcggttacaactttttctttgctgaaaattatgccaggctgaagccctcgtatcatgggcaagagagagcaattagtaagaggattgggtttctgtggaacaatctgtcagaagcagaaagacaggtttatcaagagaaagggataagagataaggaaagatacaggactgaactgatggagtacaaatccaataattcaactccaaatgctcaataggctgttttatgtaatccttagactgtcatttcatatgcttcatctgttgttcttttcatgcctttgctatagttaattttcttatccattctacagagaaacttagaagagtagctttgtgacaattctggtgtaaattatgctgaatggttttaataaacatcttgtagcggttaattcattgtagttactcttgaaattaagggtccttcattcaatttaaacatcttatttgt

SEQ ID NO: 8197 - DNA, 673 bp, Glycine max
ctaaatcgcaagcaaagaacaattttacgttacgagaaagcagcggtgacatgtctggcgccaaggacaagaggaagcaaggcgaagacgacgccgtttcggggagccagcagcagaagaaggcgcgtgaggatgaggctgtgacggatgaggaggtggaggagttctgcgccattctccgccgaataaacacggcggtgaagtacttcaagagccacggcgaggacgtggcagcgttggagaaagatatcatgcaggatgtgaaggaggcaaccagaatgagtaatcagaatgagaaggaagaagacgacttgagtttggatctaaatgtcactccccaaacccccacctgagactccgactcagacctcaatattattaccatctttctctcccttccttcgttttctatttaacatagggattttcttatatgtcccctatgaatataaggatgagttcaataaaatgcaccgacaaatcatccttgagtttcatttcaattacaattgcactcttcttatttttaattgaaagcataacttcctctagcagagatcatggtaatttagtttcaatcacttccctatttggaagataagtgtaataataattgattgttattatggtttttgcatataaaataataaaaaaactcgagggtgggcccgtc

SEQ ID NO: 8198 - DNA, 2191 bp, Glycine max
gtgctggaggcccgtggcaatttattggccttttgtctctctttgacccacctaggcatgatagtgcagaaacaatacggagggcactaaaccttggagtcaatgtcaaaatgattacaggggatcagctagctataggaaaggaaacaggtcgtcgcttgggaatgggtaccaacatgtatccttcatcagctttacttgggcaggacaaggatgaatccattgttgccttgccaattgatgaactaatagaaaaggctgatggatttgctggtgtatttcctgagcacaagtatgagatagtgaaacgcttgcaagctaggaaacatatttgtggaatgactggggatggagtgaacgatgcacctgccctcaagaaggcagacattggtatagctgttgctgatgctactgatgcagcccgcagtgcatctgatattgttctaacagaacctggacttagtgttattattagtgctgttttgacaagccgagccatcttccagagaatgaaaaattatacaatttatgcagtatcaattacaattcgtattgtgcttggttttatgttgctggctctcatttggaagtttgactttccaccctttatggtgcttattatcgctatcctaaatgatggtactattatgacaatttcaaaagatcgtgtaaaaccatcacctctgccagatagctggaagctagcagagatatttactactggagttgtgcttggaagttacttggcaatgatgacagttatattcttttgggcggcatacaaaacaaactttttcccgcgagtgtttggagtcccaagtcttgaaaaaactgctcatgatgattaccggaaacttgcctctgcaatctatcttcaagtgagcactattagtcaggctcttatatttgtaactcgatctcgaggttggtcttatgttgagcgtcctggtttattgctggtgtttgcttttgttgttgctcaactgattgccactttgattgcagtatatgccaattggagctttgctgcaattgaaggaatcggttggggttgggctggtgttatatggttatataacatcatattctacatcccacttgatatcgttaaatttttaattcgctatgctcttagcggtagggcttgggaccttgtcattgagcaaaggattgcattcacaaggcaaaaggactttggaaaggaacaacgtgaacttcaatgggcacatgcacaaagaacattacatggattacaaccagctgacaccaagttcaatgagcgtacacatgtcagtgaactcaatcaaatggccgaagaagctaaaaggagagctgaaattgcaaggttgagagaacttcatacactaaaaggtcacgtagaatcagttgtgagattgaaggggcttgacatagacacaattcagcaagcatacacagtctaaagatgcttatatatatttgcatacttatactgtaaagagttacattctgatgttgctgaagaaccatataatgtaatatgatcacacacttcaactttaatgtcctttttactctgccgtctgttttgagcacttaaaggagtgcttttgtgaggtcactttatgtcatcttgtttcttgttatcactctatctgtcacacattctccacaatttcatgatgccatgaacgaagagaaattcatattcacccttgtatcttatgcttctgatttcattttctatctatgtacctcaatttctttcatctttggaaattaattataaagtttgaagtgaattggcagaagagcgtgaagttacggtacgtttgcgtttggtttgggaccttaacagagttggtgatgagcagatagaaggagatggtgaaggtggcccccctgaactactcttctctcatgggggtcacaaagggaaaatatcagatttttcatggaacagaaatcagccatgggttatcacaagcgtagctgaggacaattctttccatgtctggcaaatggcagagagcatttacaatgatggagatgatgacaacatgtggacggccaatgattaattaaacaaacacatgatcaaaggcgatggtgctcttactaccattgctttgttgttttaattttattgtaatctttgaccatttgatttataactacaatcgccttttggtttagaaaaaaaaaaaaaaaa

SEQ ID NO: 8199 - DNA, 2577 bp, Glycine max
gaagctcggaattcggctcttggaaagagaaagcgcagggtccgacccgatacctcatctttcgccctagtgctcgttttcagagctgcaaaggaatcgacacagaaagtgattaaaaaagggagaagatatctttggtgtcaaacgctccctgattcttctgctgtggactccacttctctactgttccacctctccacactacgattctgtgaaatctctgaacgaacgctctgtaattggtgattttggagccgaactgtttcgtccaatgaaaatcaatcgcgaaagtttccgttgataagtcgtggagaatttactggtaaaatttgatccagttaaaacagttattcgttggcgaaattgagtgaatgcgtctccgatcttcagccggccggggacgtaatctgagaagatctgagaatttttaatactaaccgaagctgcaagttctcgaatcccgtgttcgtttccgaattcaaacgggatcgaattctatgagatttcatctccggaaggagcgaaattcaaatttccgttgaattaccggggaggaaaaaggaaaacagaaaaacggaaaggcatcggattcccgtgttgatggtgcttcctcaagcacgccccctgggaaccgcagggaggaaaccgacccatgactttctgtcactctacagtaattcaactgcccaacaagatccaaggccaccttctcaaggaagttacctcaagacccatgatttcttgcagccactagaacgggtagaaacgaaagccagtgcgaaggaagaagccacagatgaaatatcatcggtggttcaaaagccacgttcaccttcagttgagcacctcttacctggaggaattgggacttatagtattagccacatttcatatgttaataataataataataataatcaaagggttccaaaaccagagacatcatccctttacgggcgtcaagcaactagtacggataggaatgaagaaaactctaactgcagttcatatacttcaagtggtttcactttgtgggaagagtcgtcggggaagaggggaaagacaggaaaggagaataatgcgggcgagaaaccctctctaggagagtctgcagcaaagctagggcagtggacaacaacggagcggacgtcacagtcattttccaacaatcgtcacggcagcttcagctctcgctcttcgtctcagacaactgggctgaaaaaccagagttttattgaaatgatgaagtctgcaagggatagtgcacagaatgaagtgctagaaagcgaggaaacattttttctcaagaaagaaccctcctcgaacacccaaagagcagaactgcttgtgaaagtggatgggaagagtactgatcaaaagccaaacacaccaagatcaaaacactctgcaacagaacagcggagaaggagcaaaattaatgacagattccaaatgctaagagagcttattccacacagtgaccaaaagagggacaaagcatcttttttattggaggtcattgaatatattcattttttgcaagagaaggtgcacaagtatgaaggttcatttcaagggtggagtaacgagccagaaagattgatgccatggagaaataatgacaagccagcagaaagttttcaacctcgtggcaccgataatgggtcaagtccatcaccaacaattcctgggagtacccagaatgtagaatctggcttgagcacagcaactacctccaagacaatggatcatcaggctggaaaaatgaacaaggcttttccaattcctattccttcacagctaaatttcttcactccaacccaaatcggtggtccaggtggagtagtgtctcagctcacacatagatcggcatctgatgctgagaacaccaaatatcaaccttcagtggaatgtcagactatgactgctaccaatgaaaagctgaaagagaaagagctcactattgaaggtggtgccattagcatatcaagcgtgtactcaaaagggttgttacatacgcttacacacgcattgcagagttcaggggtggacttgtcacaggctagcatctcagtgcaaattgaacttggtaaacaagcaaacatcagatcaaatgtaccagtgtcagtgtgtggtgctaaggatggtgcagttccttctaacaatcaaaagatgatgcgctctagagttgctagctctgggaagtctgaccaagcagttaagaagctaaagacttgcagaagttaattcgaccgttatattcattctttctttattacaattcttactaattatttggggtaactttttaaaattaatttttggaaggggtattttatgtcttctgctggctttattatccagcgtgggggagatcgactgtacattcagtgtcttcttagtttgttgggatcattaggctcaccccaacaaaataaaatgaattattttagtttctaaatcatataagtataaaggcttccatactaatcgagaagctattttttaaccaaggcttctattcatgtaaagattgtaacctcccgctcctccgttatttgctgcatattcttttcc

SEQ ID NO: 8200 - DNA, 2954 bp, Glycine max
ggatctgcctgagaagttggggtcgaaatagagatttgtttcattggagttcatggacctgtcctctttgccggatttgtgaggcttgcacaaggactggtgatccaagtaagctcatgttttgcaaaaggtgcgatggtgcttaccactgttattgtcttcaacctccacacaagagtgtttgtaatgggccttatttgtgcacaaaacacgcaagatgtcacagttgtggatccaatgtccctggaaatggactaagtgtgaggtggtttatgtcatataccaactgcgatgcatgtggaagattgtttacgaaagggaactactgtcctgtttgtttgaaggtttacagagattcagaatcaacacctatggtttgttgtgatagttgccagctctgggtacattgccagtgtgacaatatcagtgatgaaaaatatcaccagtttcaattggatggggaatttgcagtataaatgtcctacatgtcgtggggaatgttatcaggtcaagaatcctgaagatgctgcccgagagatttggaggagaaggaatattgctgagagagatttgattgctagcttgagggctgcagctggtttgccaactcaagaagaaatattttctatttcaccattttcagatgatgaggatagtgggcctttaaaactaaagagtgaatctgctcgttcctttaagttctctctaaagaatttggccaatgactcaccaaagaagaaatcttctagcaaaaagactgctaagaaaaaagactcacagttatttatgactagtaaaattgacacacacaatagttgtgaaggacatagtgatattaaatctttgcatagcttagatgatgataagaatgatgatatacaatcccagagaaatgaaggtccagatgtttactcatcccctgctgctggaagcttgagtcaaactgaagcatcttttcctattgatcagccagggattttgaaacaaaagtttgttgatgaggtgatggtcagtgatgaagagaggaaacccagagtagttcgaattaaaagcaacaaggcacttattccagatagtgaagaggaaagtggaaaacacagtcttaagactcagaatgtgaaagggaagaagttggttataaatttgggagcacggaaaattaacgtggctagttctccacggtctgatacttcaagctgccaaaaagatcaagatccggtgactgttaatggtatacatctttctttttgtttttcttgtcactatatatttgcttgagaagttgtaattgtgtgatttgtgtaaaagtggtatggggctgatttttcagacattacttctttctgcccatgaaatcagtgacacattttacacattatccaggagaaaacatttaattatcctgtcaaataattactattgtgcaacaaaatttatagtaattgtataatttgtaactgctttttgtgtgtatgtatatgttcttgaatggtttgattgctttatttggttttgcttctttcctcttttatttttgtgtgatttttccaattcaaattttctttcaggaaatgaagatataagccaatggaggaagggagacaagtttgcattagatagacaagatgacacagctaggcatattgacggtaaaggaatcaaagttgattctgggcaatcaaaaattttcagggtttcgggaagagaagggaatttgattaagctgggaaaagttaagccagatgtttctgaattcaacctgacctctggtagaggcaatatgtctgatgggcggataaaacatagtattgatggaatgattaatcaggttggaataaaagccccatcaagaggtgaaaggacatatttggggaagcagtcagaaggcagctctgatgcatatgagacagatgacaataataatcgtacaccttcacattctttgccaaaagactccaaacctttactgagatttaaattcaagaaaccgagcattgaaagtcaaaattcttctcaacaggaggaagagtaccgggccgcccctcgagtcagttacgtagggccccccccctcaccttttaaggagaaaacaacatttaatgagtctgaaggtgtaagtcaatcacgtcaagacagtgcaatggatgggataatggatgcaaactggatattaatgaaattgggcaatgatgcaattggaaagagagttgaagttcatcagacatctgacaattcttggcacaagggagtggttactgatgtagtggaaggcacttcaaagttatatgttgcattagacgatgggaaagtgaagaacgtggaactcaggaaacaaggggtccgttttgttcctcaaaagcagaagagatctaagacatgaactaaacttgtccaccctttgtgatcatttaatgtggatacttttcttaattgactttgaagatttttcatctttgaggcctcttactgaatttatgttcgtagctgctcacattgccgctgatttttgggtgaagcattcttgattggagcaaatttcagtcgaaagaattaaccatttacctcagtcctttttctgggctgcaggttcttgatcgcgagttagatttttgttccttttctacatgtatctgatttcaaagtagatcctacctgtgatgtataggttcaccatttctgtagaatagattagttaaggccaacgtgttagctgtatgattaatattggtagtatatttgtgaattccaggtttcatgatttgagatattatcttgaaagatgaaattatcgtcaactttttagagttgatggttgttcacttctaccaacaaaaaataaaaaaaaaaaataacaaccactaagattcaacacatagaaataggtgcttgggtatcacggaacaaagcacgaacatgtgttaataatgatgtgtatgaaatagattcatggtttg

SEQ ID NO: 8201 - DNA, 1046 bp, Glycine max
  misc_feature (15)..(15): n is a, c, g, or t
cccctgtctgttggnggcgcccgtggatccactcagtgggagttgttccctctacactccaccaaaagttgaaattcgtagtggaagggcatttggtcatcgtatcaggcgaggaagacatcttggtgagctgcccatcctctatgccttatgtggaagccgcagaggagtcgttagaaaccgctttccagtcttttgaggtggtcagcatttcctccgtggactccctctttgggcaaccttgcctgtccgatgcggcggtaatgatggcccgagttatgttggggaacggttatgaacccgggatgggtttaggcaaagacaatggcggcataactagcctgataaaaacccaaggaaatcgtgggaagtatggtttaggctataagcccactcaggcggacatgaaaagaagcatcgcgggaaggaagagcggtggtcaaagctcgcggttgagacaagaaagtgaaggaagcccgccctgccacataagtagaagctttataagcgcgggtatgggagacgaaggtcaagtgttcgcgatatacgaagatgatgttccgagtacattggatttggtacgaccatgccctcctgatttccagctaggaaattggcgagtggagtaacgccccggcatttacgcaacgagcataatgtaaacctttacgattttaaaaagctctatagttgggcctaggctttagagtttttccttttgttaaggctttgtgtcttttgtttttgaatttataatacaaggatctttcttcatctgttcctacgtctctacccattctcattcatttgcatgtttacttctttttctgaaacggcagatccgatgacgagtcccccgaaggtactaatacccgggacccgcctatcgacttcgagcaagaaatgaatcaaacggaagatgaagggaatgaggatgtgggacttcccccagaattacaaagaatggtcgcccatgaggaccaagaaacggggcctcatcaagaagaaacagagctagtagacttaggaattggccatggaaagag

SEQ ID NO: 8202 - DNA, 1057 bp, Glycine max
  misc_feature (992)..(992): n is a, c, g, or t
tacggctgcgagaagacgacagaagggcgatcttcaagcgttctactatttcgtcaattccaacaacaccacaatgggaagaagaccggcgaggtgttaccggcagataaagaacaaaccgtacccgaaatcccgtttctgccgcggcgtgccggagccgaagatccgaatctacgacgtgggaatgaagaagaaaggcgtggacgagttcccgttctgcgtgcacctggtctcgtgggagaaggagaacgtctccagcgaggctttggaggcggcgcgcatcgcatgcaacaagtacatggccaagttcgccggaaaagatgccttccacctgcgcgtgagggtgcatcccttccacgtgctccgcatcaacaagatgctatcgtgcgccggggccgacaggctccagaccggcatgaggggcgcctttgggaagccgcaggggacgtgcgctagggttaacattggtcaggtgctgctctcggtgaggtgtaaggatgctaacagtcaccatgctcaggaggctcttcgtagggccaagttcaagttccccggccgccagaagatcattcttagcagaaaatggggatttacaaagttcagtcgaagtgagtatttgaagttgaagtctgagaacagaattgtgccggatggggtcaatgccaaggttcttgggtgtcacggacctttggcaaatcgtgagcctggaagagctttcttaccagctactgcttaggccatttagcagttagcactaggatactcattgaatatgtggtttttcttttcacctggtgaatggatatgttgtaactataaaatgtgtttctgtctgcgttttgttagaagatatttgaattatgtatctatctgtcttccaagatgtcctgggggcatgaaagatgcacattcgatgtatttagatctcattattctgtaagagtttgaacagaatggaaataaatatatatggtctttattgtgtaaaaggnccgaacaacaatggtgagtcatggcctaaatcaggccgtatggcgtagtattcggacttcaggtg

SEQ ID NO: 8203 - DNA, 759 bp, Glycine max
attaatacctctaaatcatttccttattccacacacacttctttatctgcatctaattcaatatacaacactgaaactttcaaagctcttttgagaacttgttattgcaatggctgacatagatcgctcctttgataataatgtttctgctgtttctactgagaaatcaagccaagtttcagatgttgaattttctgaagctgaggaaatccttattgccatggtgtataatctggttggggagaggtggtctttgattgctggaagaattcctggaagaactgcagaagagatagagaaatattggacttcaagattttcgactagccaatgatcggtggcagaaaacgaagcaaggaaatttttggtgcctacaagtcattacagtgactttgtggggatatgaaatggaaattgatcctattaatcatatgggtacttatatttgcattttgcggtaaccaacaaaaaggggcatgccattctaaaagcccttatgtttaatgttacttaattttatctttgtaatgttcccaagtgttttaggcaatctatgattcagatctgttcgatcatggcaagaacagtatgtacttaattaatgcagatcacctgcatgtgcatgtgtatttctggttcatttagccttcttgctaatggttacaactagctttgccttggcctatagcattggatttggaagcggattttttctttgcatgtatacacatacatttagtgtattcctaaggcctcttt

SEQ ID NO: 8204 - DNA, 719 bp, Glycine max
ttttttttttttttttgacctggaatctacacatcctaatttttatatttagctccaacaagcacaaaatattgaggtcagctcgagttcaaatggcagcagacactgataataacattgcaatgctgtccagttcaaaatttgatgatgaatattttcatttaactgaggtacactatatataatcaatgtgcagaaaattacattggcctttgtctccgctatggagtgtagaggggcatgctaggcaagatcagaaagcataatcatcgggagaccaaaagaacagtgataggaaactcacatccttcgactccaactgtatcaggtaaaaaatatgatggggagggaaataatcagtaaattacagacgaccttggcaaaatccctccccagcgcctcaagctcatttagaaaagcaagatgtgatgcaaagaatatatcatggcgatctcatggcttcttgccgtctaagaggaatgccttcaccaccatcaaagccatcctcttctgaatgcttaggaagtctaacagataaagatggttgtaaaccatcagccatatccttagttttgtgaagaagaaaagttcctgatagaatggtcacaaacccacatatttctgtgataacttgtgttggactttgtctatcccagtcctttaacataataacactagccacaatggtaaatgtagtgaacataacatattatatggga

SEQ ID NO: 8205 - DNA, 2361 bp, Glycine max
ggctcgaggtttctatctctttttgacgcgcacttgaagatttgaagtacttccacaaagggggtaacctttttcctccgttgaaaacgaggggaagaaggtttctcaactgcccttttcacacctcaacttcccgccttcttcacttgcttctcgaacttcttcccttttgaagctattaatactagttccttattcagtttctagatatcttacccactcgtccgcagaaaaccacccctctctctctaagcacagcctaagatgtcttactcatgatttcctgctatctcaaattgctgctacaagcaagaagaagtggagtctgattgaactctgaagtgggcagaatgcgttttgaaatcaagtggaccttgagtgcttaccgtagtgtacaattttgaattgctttgccaatattgctgggtgaattgatacagtgggaggcaatcaatagttgtaacttggatattcttaaggaaatgtaaacttgataagttggagctccaccaaagtagtaaagatacattccaaagatgatgaagaaacaattgacaggcatacggggtgattctcccctacaatcggcaatccgagttggaaatttagaattggttctggaaatcatctctcagagtccagaggacgaattaaaggagttgctttcaaaacaaaacaactcttttgaaactgccttatatgttgctgctgaaaatggtcatcttgatatactcaaggaattgattagataccatgatattgggttggccagcttcaaagctagaaatggattcgatgcattccacattgctgctaaaaatggacacttggagatattgaaagtcctcatggaggcctttcctgaaatttcaatgactgttgatctgtcgaacactactgtgttgcatactgctgcagcacaaggacacattgaggtagtaaattttctcttggaaaaaggtaatagcctggtaactattgcaaaaagcaatgggaaaactgtgttgcattcttctgcaagaaatggctacttggaggttgtcaaggcccttgtgagcaaagaaccagaaattgcaatgagaattgataaaaaggggcagacagcactccatatggcagttaaaggacagaatcttgagttggtggatgagctcgtgaaattgaatccatctttggccaatatggtggatgccaaggggaacactgcactgcatatagcaacccggaagggtcgtctacaggttgttcagaagttactagattgcagagaaataaacacagatgttatcaacaaatctggagaaactgctttagatactgcagagaaaaatggtcgtttggaaattgccaactttctgcaacatcatggagctcaaagtgccaagtccatcaagtcacctactacaaacacggcccttgagctcaaacaaacagtgagtgacataaaaagtgaggttcataaccagctggaacacacaattaaaacgcaaagacgtatgcaaggtatagcgaagcgaatcaacaaaatgcacactgaggggcttaacaatgcgatcaactccaacattgttgttgctgtccttattgcaacagttgcttttgctgccatatttaatgtcccgggccagtatcctgagaaaccaagtgaactctctcctggaatgtctcctggggaagcatatattgctccagatattggattcatgatattcataatctttgattctactgccctcttcatatcattggctgttgtgattgtccaaacatcagtggttgttattgagaggaaagcaaagagacaaatgatggcagttataaataagttgatgtgggttgcatgtgtgctgatttctgtggcatttattgcaatgtcatacataattgttggggatcataaagagttggctatagcagccacagctctaggaacagtgattatggcagctactttaggaacactctgttattgggtgattgctcatcgccttgaggcctcaagattgcgaagtcttaggacaacaatgagcagtaggcagtcaatgtctatgtcaatgatgtcaggatcagagaatgagtataagacagtgtatgcaatataactttgatttctaccatttcagagttctccctccttttttggccagttacactaacattgtaggtgtttgttgcttagtaaaacaaacattaactactgcaacaaaagcatgcctttgcagaacataggcaaaagatgtaatcatagtccacttgataagtgaatgttattctaaattgaaagtattggatcatcatgcctattttaggtattttcacattagcttcatcagaatttgaatattatacaaatttactgtt

SEQ ID NO: 8206 - DNA, 2285 bp, Glycine max
ggctctaccattagcgaagtatgttaaagctgtgtatcatactcgagtttcagttggtatgcggttcaggatgctgtttgaaacagaggagtcaagtgtgcggagatacatgggtacaataactggcattagtgacctggatcctgtccggtggcaaaactcacattggcgctccgtcaaggttggctgggatgaatccactgctggagacaggcaacctagagtgtctctttgggaaattgagccattaactacatttcctatgtatccatctccattcccccttaggcttaaacggccatggcctccaggactgccttcattccatggcatgaaggatgacgattttggcccgaattcacctctgttgtggctccgagatcctgatagagggcttccgtctcttaattttcaggggattgggattaatccttggatgcagccaagatttgatcccaccatgttgaatatgcaaacagacatgtaccaagctgcggctgttcaggacatgaggagtttagatccttccaaacagcattctgcttccttacttccatttcagcaaccacagaacttcccaaacaggactgctgctttaatgcaggcccagatgttgcagcagtcacaacctcagcagatttttggaaatactcaagagaatcaacattccccacaatctcaggctcatcttcagcaacatctacaacatcaacactcgttcaatagtcagcatcatcatcaccaccagcaacaacaacagcgacagcaacatcaagtggtagataatcaacagatttctagtgcagtctctacaatgtctcagtttgtttcagctcctcaacctcaatcaccacctatgcaagttatctcttccatgtgccaacagcaaaacttttctgattcaaacgggaacactgtgactactattgtttctcccctgcacagtatcttgggttcttttccccaggatgaaacatctcacctcctgaaccttcctagaacaagctcttggattcctgttcaaaattcaagtgggtggccctcgaagcgtgttgcagtggatcctctcctttcttccggagcctctcaatgtgttctacctcaggtggagcagctagggcagccacagagtaccatgtctcaaaatgctatttctttaccaccttttcctggtagggagtgctcaatagaccaagaagggagcaatgatccacaaaaccatctcttatttggtgttaatatagagccctcgtcccttctcatgcctaatggaatgtcaagccttaagggggtctgtggaaacaatggctcctcaaccttgccatatcaatcttctaattatctgaatactaccacacggactgattcttcattgaatcatggaatgacccccaacataggcgactcgggtttcctgcagtgtctggaagaggcaggacaaggaaacccactgaacaaaacctttgtgaaggtttataagtcagggtcctttggaaggtcattggatatcactaaattcagcagctaccatgagctgcgtggtgaactcgctcgaatgtttggccttgaaggcgagttggaggaccctgtgagatcaggctggcagcttgtatttgtagaccgagagaacgatgttcttctccttggtgatggcccctggccggaattcgtaaatagcgtatggtgcataaagatactttctcctcaggaagtgcagcagatgggcaacaatggccttgagctgttgaactcgtttccaattcaaaggctctctaatggcatctgtgatgactatgtgagccgtcaagacccaagaaatttaggcactgggataacaaccgtggggtctttagactactaaatagtcttcacttcttctatcacatgtaatattattacccttacttctcaaccctttctttgtgtacggtgggaagcacctttgcctaagtgtagtttacatagcctactctttagcctttggatgttttcctgttttttcctgctaggacatttcataaactaatactgtaactatatggcatctagtcattgtgctagccacaatatatacgatacttaatccgttaggaaatcaatgcgtgagatatgttctcttaacttgtacagaactttttctttctagtttggttttattttggcttaaatgtttgggggtgcatgatttgactatgaagcatactaggcaatggagtggaggtgatgttgaacttggttgacctttaatgtctatcaaaatatttatttattttgttgggaaaaaa

SEQ ID NO: 8207 - DNA, 2535 bp, Glycine max
tcagctacgtaggccccccccccacctaatttctgtctctctctcttctgtatttgtcttgattccgatgcgaatggtaattgcagaaaccccaaccctcctttcctctccctcctcctagatcgaggtatcctattttatctggagacctgacatggtaaaacagtaacataactatgttttaagctgatttatagactttgccctctggttccattgaattctgaaccatatttatgatgggcaaagggcggcggtaatttaagtcagatgaaaattcagaacatttttgtgggcaaagaggcagaagttattactaatggctttgagggttatagcgatttcggcggtttctacagtattaagctttgtgggtctgcagttttgcacagacttgtctttggataaacttacatcagatggactgatcggctggaatttaattcacttggacaatgccagccaagacattgagttgcctttgggtttgtacaccaccatagggctactggtgaattgcatgatcaatgtatttatccttctcaatctttgcctcaaggctgtgtttttcacggagttatatgcttctgaaactcgtaaactggttgaacgtttcattaattatgtcatttacaaggggatgtttctaccattgattgtgccaccaacaatttatcaagcaggtctttggtcaacttggttgaccgtgctttgttctttgaagatgtttcaagctttggctagagatcgtttggaacggctgaatgcatctccgtctgctacaccctggacatatcttcgagtatattcagcattgttatttgttttcatggttgatgttctctggataaggttttgtctgacaatatatcaagcacatgggtcctctatgtatctgttattattctttgagcctttcagtatttgttttgagaccctacaggctattttggtacatggatttcagttgcttgacatatggttgcatcattcagcttgcaatagcagtgatttccgaacacctaaactgcttgacatgttaactgcaggttcattgttggaattgaagggaattctcattcggaacttgggatttttattagacatggcaacattttttatggcacttggccattacttgtatatatggcggcttcatggcatggctttccatctaatagatgcattgctatttctaaatatacgtgcattgcttagtgcaataataaatcgcataaaaggctttatcaggctaaggatagctctaggaacacttcatgcagctcttcctgatgcaacaactgaggagctaagagcatatgatgatgaatgtgctatttgtagagaaccaatggccaaggctaaaaggctaaactgcaatcatctcttccatcttgcatgtttgagatcttggttggatcaaggcctggctgagatgtatacttgtccaacatgccgaaagccactttttgcgggtgtgcctggaaatgaaacaaactctgatgcggggacgatatctagtgatgagcaacttgcacggcaaataagtgctggattggatcggccaaactctgctaggcataccatgcctacaggattctatccaaatcagacactaaacactcctgaaggtgttccttggaggggtgcagggctggactcaggttggttgcattcttggccaaatcaaggtgttgatggggccggtccatctactgctatcagaacagttggattaggaagagttcaaatgatgatgcggcatcttgcatctgttggagaaacctatgctcagactaccttagaagataccgcgtggaacctttggcccattaatccctctcaggcttctgcaagtggttcaaccattcctccccctggtggaagattgcctgaaagaactggtagtttacatttaaggactgcttcacagtcttctaatgataatgttgcaaatatacttgccatggctgagactgttcgggaggttctacctcatattccagatgacatgatattccaggacttgcaaaggacaaattcagtcacggttactgtgaataatctcctccaaatgtgatgaatcaaggtattattttactcctcaaggaatatgaagaagggcatagagttactactacaattgtccttggaaaggcataggctttcattttatgtatatagagtcagcacattcaatctgttgtactcaagaaagatagcagaaaatataggcattttctttctttctttgtcttctccttgaatctgtagtaaaataaatgtggggtgtgttcccaagttgggtaagttcctatctgtcatggttccatttcaattgtaattttgaatttgctgctacctccaaaatatgatgtaattttctttccactccccactccattttgtggggttggcagagagagtgaggggaatatcaattatcttcaagtgactcaatctgagtcatgcaacatctaattcaaatgtgatctaaaactataaaatagattctccattaaaaaaaaaaaaaaa

SEQ ID NO: 8208 - DNA, 1720 bp, Glycine max
caagtttgttcactccacacaaaagcaaccatatttttcagttttcacacctaaatcctttgacccatcatcactattaatctacaagctccatgttttgtttgcaatcccctgcgtctgcttgttggtatcatcagagctttgtgaaacataaagttaaagcagggcatattgcagagggagcaaaccgaatatttcaaaacttgttctactttttattatcactgttgcatttatttcagatatttagtatttgcctacaagtttgttctttagtttaaacacagacaagacgactctttatggcggctataaccaatttgaacttttcttccttgtgtaaaaaaaggttttgtgtgcgtttgtgcgtgttggagttggctttttgaagtgggtgcatgctgaagttatatgtgtatgtgaaagatgaagaacaatagagataaagaaaagggtaacgacgttgaccagagttacagacagcatcacacgttgtcaatgccaatgatgttttctggtttgaacagagagaaggagatgtcagccatgatctctgctttgacacatgtggtttgtggagaagatgagcatcatggtgctgattactctcttcttaatcacaatattaataatactaatagtgcagttgttggtgatgatgattttactgtaacatcaaatatggcttctggttctatgccaccttcttctacttgttcatctcaaggtggcaactctgttctcaagagaagacgggaatatgataatacaaatgatttctcacgtggaggttcattccctgctatttcaacaattgctgaaagttcaagcacggtaacaagaagaacggcgaatacagtatacgattacgaatacagaacagagaacgtgaaagtagtggaggaagaaccgaggagaaaatacagaggagtgagacagaggccatggggaaaatgggctgcggaaataagagaccctttcaaagctactagggtgtggttaggaacatttgaaaccgctgaggacgcagccagagcctacgatcaagcttcattgcgtttcagaggcaacaaagccaaactcaacttccctgaaaacgttagactcagacaacaacaagaacctccgttgaacttgaaccctccaccacctaatcatggggctattttgtcaattccttcaaccactgttcacactgaggctcttcagggttcacttggttcaagcaatttttatgagcattcttattcgcatcttcatgagtttcccgtgagtctctacgatcagattgcagagtcaacatctactactatggcttctcatcatcttcaatttttgccgccagcttcttcctcaactatgactatgacatctccgcaggcaccaccttcgatttatcctacgcatccagcggcatggtcttctggttatagttataatagctcttcttctgcttcggggtgatgtaaattgcgttttatttcaagtctctctcgtttttgccccttgtattgtatcattgttactctcctctgttttttgcatttgcaccacgaccatttccatccaggagtggttttttgtgaccatgttattatgatcaagcaaatcatataattcacagttaacagtttagtatctgtgtataatagagttttatttatcctcccatcacatttctccaaacaaccatatcaatcttatatctcttccttcttct

SEQ ID NO: 8209 - DNA, 1385 bp, Glycine max
atattatcagtctctggtttggtggaattgttgttttcacaatgaagacagtcctattcctccttctggtgtcagcgttaatccccatcgccgtcgcgcagcccaatgacttctccgacgcaaacctcaacgagttcaactcctccatagccataatcataatcatattagtaatcgcgtttttcctcatggcctttttctccatctacgtgcgccactgcgctgattccccttccaacaccgtcaggcctctcaccaccgcacgctccaggagggccgcgcgtggccttgaccccgctctgattcaaacattccctatcctcgaatactccgttgttaagatccacaaaatcggaaaagaagctttggaatgcgctgtgtgtttgtgcgagttcgaggacaccgaaacgctgcgtttgctccccaagtgcgaccacgttttccaccccgagtgcatcgacgagtggttgagctcccacaccacgtgccccgtgtgccgcgccaacctccttcccaccgagtccgaggatgctattgctaacgccaacgccaacggtgttgttccagttccggaaacgttaacgcgagacatcgaatcccaaaacgacgccgtgcaagccgcgccagagcagcagaacgcggaggctgacccagttttacccgaaccggaagttgtttccctggacaaaacgctaaaccggaaccgcacgcgagggtcgcggtcgaaccggccgcggaggtttcccaggtcgcactcgaccgggcactcgctggtccaaccgggagaaaacactgaccggttcactttgaggttgcctttggaggtgaggaagcaattaataaaccgccaattgcaacgtgcgagtagcttgatcgtgttacccagggaaggtagttcgcggcagggttaccgaaccgggggagaagggagtagtagagccaaaatctcgaggcggctggaccggagtttgaaatcggaccggtggattttctcaatggctgcgcccttttttgcaagggcgttgtctattagatcgcctagggttcgaaacaatgatgttgaaggagcggcgtcctcgtcgtctcccaccgcgcctatcatgccgccgacggccgttgactcggcaaggcctccggtttaaccggagtttcgccaacctccacataccttgtcatttttttatttattttttgctttatttgcgggacacgattttgttttgggtgaagaatttgtaaactgtgtataattaataaggtatcatgtttttttttgtaggccggttttagaagaactgggtcatgatttcatattctctttgaggttgttaagctagttagttgacctcggattttaacatacagcatgtgaagaaaaaaaatgc

SEQ ID NO: 8210 - DNA, 1400 bp, Glycine max
gtcttctcctcacttttcacaatgaagaagcacattcacatagccctattcctccttctggtgtcaccgttaatccccatcgccgtcgcgcaggcccaatcccagcccaatgacttctccgacgcaaacctcaaccagttcagcccctccatagccataatcatagtcatacttgtcgccgcgcttttcctcatggcttttttctccatctacgtacgccactgcgccgattccccttccaccaccgttagccctctcactaccgcacgctcccggagggccgcgcgtgggcttgacccagctgtgatccaaacattcccaatcctcgaatactccgaggttaagatccacaaaatcggaaaagaagcgttggaatgcgcggtgtgtttgtgcgagttcgaggacaccgaaacgctgcgtttgatccccaagtgcgatcacgttttccaccccgagtgcatcgacgagtggttgggctcccacaccacgtgtcccgtgtgccgcgccaacctcgttcccaccgactccgaggatgctattgctaacggtaacgctaacggcgttgttccagttccggagacgtttacgcgagacattgaagcccaaaaccacgccgtggaagccgcgccagagcagcagaacgcggaggctgacccagtcttacctgaaccggaagtagtttccctggacaaaacactgaaccggaaccgcacgcgagggtctcggtcgaaccggcctcggaggtttccaaggtcgcactcgaccgggcactcgctggtccaaccgggagaaaacactgaccggttcactttgaggttgcctttggaggtgaggaagcaattaataaaccgccaattgcaacgtgcgagtagcttgatcgtgttacccagggaaggtagtttgcggcagggttaccgaaccggaggagaagggagtagtagggggaagatttcgaggcggttggaccggagtttgaaatcggaccggtggattttctcgatggctgcgcccttttttgcaagggcgttgtctattagatcgcctagggttcgaaacaatgatgttgaaggaacggcgtcgtcgtcgtcgtcttccaccgcgcctatcttgccgccgacggccgttgactcggcgaggcctctggtctaacctgagtttctccaacctccacgtgtcgttgtttttattttttgttttttcttttcttacaaggcacgattttgtttttggtgcaaaatttgtaaaatgtgtataattaataaggtagcatgtttatatgttttagaagaaatgggtcatgtactaaatttcatactcttgaggttgttaagctggttagttagttaccttcagattttaacaaaacagcaagcgaaaaaaaatgcaaaattatcttgttt

SEQ ID NO: 8211 - DNA, 1511 bp, Glycine max
tcagctacgtaggcccccccccccccggtggatctccccaagcatagagcatgttagtcacgttagcagcgggcaagttggtccggcggcaccttccccttttctttcggctgttccatcttcaaaaccgtgggctcggatcttcaaaatcaaaacgaatttccattcgttatcatataaatacctcatcttcatccccaaaaccactttcagtttcagaacacaaagcaatggtggcgctcctagtggcaactacatccgaccctgcttccatcaacccggccaacgcgcttttgggcatgcccgggtggaaacccggtccccatttccaggatgatatgaagagctatgtgaatgaaggggtgagggtgttggtacatgggaagagcatagttgcggaagatgagttggacaagaggtgggaagaagttactggggaggttattgatgaagtgatcttcttcagcaagcacactgctgcctccaacaagcctgccctgactgttcaccctattggagttcctcatttgcgccaaggcgatgttcccccccaaggcggcagacctggatgggcagctcttccaaatcctaggatggggccttggcttcgccttttgaaaaaccttgcccaagctcataatcttgtccctgaatttgagattactttagaggccactcaccatggaccgttgaccaataagccaaccatgtttttggagattggtagtactgaagactattggaagagacaggatgctgctcaagttatggcacagttagtatgggaaggacttggacttggaggtgtgtcagatgtaggaaactggagcagggagaatgataacaagaaaatccttcttgggataggtggtggacattatgcacctcggcatgtggatgtagtattgaaagataatgtatgggtgggtcacctactttctggatattcgctgccaatggaagatccaaaccagtcaaaaggagaaaaaaatgtggagattggtggaacatggagacagtctataaaagctgcatatgaagccacttattctgcatttcctggtggtgaaattcttgcacatctagaccacaagagtttcaagggctggcagaagaatgccataacaggattccttgcggagcaaaacattaaaattggaaaacccaataacttctattgagtggatgctatgtgaacaacatagcttctgcagagtgcggaatgagtcaggctgaagattttggtagatcatactagcaatttaattcagttttcttgagatcacagtgatagttaatgaataactgaagtttgagataaactgatatatacataaatccaattctgatgaaaaacaatatttgcaattacatcaattaaaaccatatatagcaataatactttatagaatgtttgtttttatggtttgtttccaatgtttttaatgttagacctgtcattaaactgaaaaaaaaaaaaaaaaaaaaaaactcgagactagttctctcgt

SEQ ID NO: 8212 - DNA, 1458 bp, Glycine max
gcggcacgagattcattcaagaaactgacaaatctgcactcccaaattacgctgcattaacaaagacggtgattctgtgacttttatgaatgcatggtaacatgtttttcttgtaaacaaactctcgcggccgcccacgcgtccggaaattctttattttggaatagaattcaagaaacaaagactggcagcaagccagagaccggccctggaacgggaatcttcaggactggatgctttggcaaatgcagcaatactgggagatgatgcaagtgactctggcagaacaccagttgttaccaccacaaaacatcctcggcatagacctgggtgctcttgcattgtttgtatccagccaccaagtgggaagggcaaacacaaacctacatgcacctgcaatgtgtgcatgacagttaaacgtcggtttaaaaccctgatgatgcgaaagaagaagcggcaatccgaacgtgaagcagagattgctcagagaaatcagttatcatggcggacgaaagatgaatcagaagtagatagcacctctcgccatttaactccagttgacggtttggagaatgaagtaagggtgcaaaatgaattagattcaaggagtccagacgatgcggtggctgaagctgccaagggacaattagacttgaattgccaacctgatcgagaagatgtgcaagctgggccgaacagcttgagcatgacgagtcttcttgaagaagcaaatctcccgctggagacctacctgaagcaaaatggccttactagcttgataacagagcagcaaacaaattcagcttcaaatgtgcaggcacagacaaccaatgatagtgaggtgaaacacaatgaggattgcggaaccgctacggttattcatgcgcaggaaagcagccctgaagagaacagtgggcaagataaagagcaaaacaattaactcatgaaatcttgccagttacattttcttttttcctttttttttttactccgaaatcattttacaagaatccttgcttaagttataaaattataagaggttcatttgtatgtgtatatatattttctgttgttgtctgtgtcttgtggttgtgaaatttccccccaaaactcaataacatatatacgccaaagcttgtgttttagggttgtaaactagtgaggcaaggagttgaaggaaagcaccaccttgctgtgttataatacatctggttttgtttctctggtaagtgtggtgagtctgaataagcattgtttgtcttgtttgttatatggagaaagggagagtacacctaatttcgtttcttagtttgaaaagccattatttggctttgccgttttaataggaaaatgctcttttgcatgaaaagcatttcactgatgttgtacggaattaatgtgactggttgatgtatgtaatagttgtgtgatttcttgaaagctactttttattactaa

SEQ ID NO: 8213 - DNA, 2153 bp, Glycine max
gttaacttgagaagtagtacctaggctcactgccttaaccttatcacaatggataataactaactcctactaatacttgtcctttatttgttcttaaaggagaaacaactttccattcacgacacgctcacgccgtcaaaccaacttgagtgcgttccaggaaacacatcccctctccatttcattcacttctctgctctctctttctcccacgaattcccaaacttattttcacgcttccaatttccgtcacgtaaaccatgcatcaccgcctcccaaattagggtttccgacaggcgcgtggaggaatcgatggcgaccgtgaatccgcagcctctgcagttcgaggaccctgctatacccgtcgacgacgatgacgacgacgacgacgacgacggcggtgatgatgacgctatggatgacttggaggatgcgaatgttaattcagtgaacgttgctgctaatgccgcggcgagtgtaaatcatgaagcggtagtggctatgccttccagaactagcgagctcactctttctttcgagggcgaggtttatgtctttcccgctatcactcctcagaaggtgcaagctgtcttgctgcttttgggaggacgtgatgtgcaggcaagggtgcctgctcgtgggcccccccccccccaaagtaacaggggcatgggtgatactccaaagcgttcaaacctttcacgaagaatagcatccttagtcaggttccgtgagaaacgcaaggaaagatgttttgacaagaaaattaggtattccgtcagaaaagaggtggcacagaggatgcatcggaagaatgggcagtttgcttccttgaaggaaagcccaggttcatctaattgggattctgcacagagttctggtcaagatggcacttctcattctgaatctgtacgtagatgtcaccattgtggtgtcagtgaaaataatactcctgcaatgcgtcgggggccagctggaccaaggactttatgtaatgcatgcggccttatgtgggctaacaagggcacactcagagatctcagtaagggtggaaggaatctttctgttgagcaaagtgatctggacactcctattgatgtcaagcctacttctgttcttgaaggggaattgcctggcatccatgatgagcaaggtagttctgaagatccttccaagtccaatgcagcggatggttctagtaatcatgctgtaaaccccagtgatgaggaattgcctgaaactgcagaacactttacgaacgttctgccactgggaattggtcattcttcaacaaatgacagtgaacaggaacctctggttgagctttctaatccttcagatacagatattgacattccaggaaactttgattagaaggtactaagtgattcattaagttgaggggttttataaaatggtccctctgtagtatattgtcggtgtactaatcagatgcagatctagaagcagtgatacatacccgagacaattaggaaattcggggttatgactgatagtagccctcggaaatggaaatgattactgattagcaagtgtcaagaagcactgctgttccggtctaacattaaatagtagtctgcaatattgatgctggcataagtgccaagacattgtttgtgtatatgttatcagatgatcttccttcagtgtttatatcataaaatattcattagtatggggcctgtgttgtaagaatgcggtctgcttgtccctgactgtaataatttcattgagatcaaagctctgctaccctcattttagagatgaaatttcggtgatatgctatgctatgcctcagctacgtaggccccccccccgaatatcaacgcaacggtgtgctaatcacgacctttgatggagtttaggcttgtgctgctgtgctcctggtgagaacatttggatatgttaattaatacagatagactagatccaaatgtacatacataaataaatattggttgtcgtcttctctatgttctttcacacttatgttatcattgctgttgtggtgcccgaaaataattgccattcttgtcatcatcatatcccaatagcctgatattatattaagcatagttataatcaaataaaattattggaatttttacgctaaaaaaaaaaaaaaaaaaaaa

SEQ ID NO: 8214 - DNA, 1457 bp, Glycine max
  misc_feature (1438)..(1441): n is a, c, g, or t
  misc_feature (1443)..(1454): n is a, c, g, or t
  misc_feature (1456)..(1456): n is a, c, g, or t
ggaattgaccgacggacccacgcgtgcgcctacgcgtccgctcttgatgcttgcatttgagcactctactaaaatctctaggacatgggtgatactccaaagcgttcaaacctttcacgaagaatcgcatccttggtcagggtccgcgagaaacgcaaggaaagatgttttgacaagaaaattaggtattccgtcagaaaagaggtcgcacagaggatgcatccgaagaatgggcagtttgcttccttgaaggaaagcccaggttcatctaattgggattctgcacagagttctgggcaagttggcacttctcattctgaatctggacggagatgtcaccattgtggtgtcggtgaaaataatactcctgcaatgcgtcgggggccagctggaccaaggactttatgtaatgcttgcggccttatgtgggctaacaagggcacactcagagatctcagtaagggtggaaggaatctttctgttgagcaaagtgatctggacactcctattgatgtcaagcctacttctgttcttgaaggggaattgcctggcatccatgatgagcaaggtagttctgaagatccttccaagtccaatgcagcggatggttctagtaatcatgctgtaaaccccagtgatgaggaattgcctgaaactgcagaacactttacgaacgttctgccactgggaattggtcattcttcaacaaatgacagtgaacaggaacctctggttgagctttctaatccttcagatacagatattgacattccaggaaactttgattagaaggtactaagtgattcattaagttgaggggttttataaaatggtccctctgtagtatattgtcggtgtactaatcagatgcagatctagaagcagtgatacatacccgagacaattaggaaattcggggttatgactgatagtagccctcggaaatggaaatgattactgattagcaagtgtcaagaagcactgctgttccggtctaacattaaatagtagtctgcaatattgatgctggcataagtgccaagacattgtttgtgtatatgttatcagatgatcttccttcagtgtttatatcataaaatattcattagtatggggcctgtgttgtaagaatgctgtctgcttgtccctgactgtaataatttcattgagatcaaagctctgctaccctgattttagagatgaattttaggtgatatgctatgccactcaaggatgggttgctaatttgaatatcaacgtagcggtgtgctaatctcgacctttgatgaagtttaggcttgtgctgctgtgctctggtgagaacatttggaatatgttaattagtacagatagacttgttccaaatgtacatatacttacaaataaatattagttgtcgtcttctctgtgttaaaaaagaattcctgcagcccggggnnnnannnnnnnnnnnncnc

SEQ ID NO: 8215 - DNA, 1050 bp, Glycine max
ttatttcgcaatggtcaaacctatcagcagacgttagatggctgcaagacccttctgactctgagaaccgttaacttgagaagtagtacctacactctataaccgtacaccttttcacgataactaactaccactactatctcaaaggagaaagaaaattcacgacgctctgacgccgtcaaaccagatttcactctcattttgagtgcgttccaggaattgcaaacacaacccctgctctccacaacataacgcatcttcacttcacttcattcaatcctctctcccctatccttctcgtaccctccaccaattctgaaacttattttcaacgcttccaatttccgtcacttgggtcatgctccgaaattagggtttccgacaggcgcgtggggggaatcgatggcgaccgtgaatccgcagcctctgcagttcgaggacccagcgatacccgtcgacgatgacgatgacgacgacgacgacggtggtgatgatgatgctatggatgagttggaggatgcaaatgttaactcagtgaacgttactaatgccgcgagtgtaaatcatgaagcggtagtggctatgccttccagaactagcgagctcactctttctttcgagggagaagtttatgtctttcccgctgtcactcctcagaaggtgcaagctgtcttgctgcttttgggaggacgtgatgtgcaggcaggtgtgccagcagttgaaccaccatttgatcaaagtaacagggacatgggtgatactccaaagcgttcaaacctttcacgaagaatagcatccttggtcaggttccgcgagaaacgcaaggaaagatgttttgacaagaaaattaggtattccgtcagaaaagaggtagcacagaggatgcatcggaagaatgggcagtttgcttccttgaaggaaagcccaggttcatctaattgggattctgcacagagttctggtcaagttggcacttctcatttctgaatctgtacgtagatgtcaccattgtggtgtcggtgaaaataatactcctgcaatgcgtcgggg

SEQ ID NO: 8216 - DNA, 2167 bp, Glycine max
  misc_feature (1)..(1): n is a, c, g, or t
  misc_feature (3)..(3): n is a, c, g, or t
  misc_feature (5)..(5): n is a, c, g, or t
  misc_feature (8)..(8): n is a, c, g, or t
  misc_feature (15)..(15): n is a, c, g, or t
  misc_feature (19)..(19): n is a, c, g, or t
  misc_feature (24)..(24): n is a, c, g, or t
  misc_feature (28)..(28): n is a, c, g, or t
  misc_feature (40)..(40): n is a, c, g, or t
  misc_feature (53)..(53): n is a, c, g, or t
  misc_feature (55)..(56): n is a, c, g, or t
  misc_feature (60)..(60): n is a, c, g, or t
  misc_feature (66)..(67): n is a, c, g, or t
  misc_feature (74)..(74): n is a, c, g, or t
  misc_feature (82)..(82): n is a, c, g, or t
  misc_feature (85)..(85): n is a, c, g, or t
  misc_feature (92)..(92): n is a, c, g, or t
  misc_feature (97)..(97): n is a, c, g, or t
  misc_feature (100)..(100): n is a, c, g, or t
  misc_feature (112)..(112): n is a, c, g, or t
  misc_feature (125)..(125): n is a, c, g, or t
  misc_feature (137)..(137): n is a, c, g, or t
  misc_feature (150)..(151): n is a, c, g, or t
  misc_feature (160)..(160): n is a, c, g, or t
  misc_feature (168)..(168): n is a, c, g, or t
  misc_feature (173)..(173): n is a, c, g, or t
  misc_feature (177)..(177): n is a, c, g, or t
  misc_feature (181)..(181): n is a, c, g, or t
  misc_feature (207)..(207): n is a, c, g, or t
  misc_feature (209)..(209): n is a, c, g, or t
  misc_feature (216)..(216): n is a, c, g, or t
  misc_feature (221)..(221): n is a, c, g, or t
  misc_feature (228)..(228): n is a, c, g, or t
  misc_feature (247)..(247): n is a, c, g, or t
  misc_feature (267)..(267): n is a, c, g, or t
  misc_feature (279)..(279): n is a, c, g, or t
  misc_feature (312)..(312): n is a, c, g, or t
  misc_feature (2009)..(2009): n is a, c, g, or t
  misc_feature (2042)..(2043): n is a, c, g, or t
  misc_feature (2061)..(2061): n is a, c, g, or t
  misc_feature (2065)..(2065): n is a, c, g, or t
  misc_feature (2106)..(2106): n is a, c, g, or t
  misc_feature (2116)..(2116): n is a, c, g, or t
  misc_feature (2132)..(2132): n is a, c, g, or t
  misc_feature (2154)..(2154): n is a, c, g, or t
nananatnttggggnagancctgntcangggggtcccaancaaaaaacatttnannattnggggcnntgaagcnggaccttnctnccatagncgaangangcctaggccaanaataaagggccgnggaaactgaggnttcaaaccgtccnntttgatggngcattttnaaagnaacnggangccgcctaagaaaaccttccttgccngncagcttntgacnccacggngttgcaatgatcacattcntcctatcttggcattcttgngattatgcaatncctgatttagtatttgcccgacaccaattgganccttcccttctgccaccagagatgcaatttcatactcagtttgataatagtcagcacccatcatcatcgtatcctgaagctccacaccagactccaaacgtgagcgtactccaacaatagaatgttgaacgctgcactccctcaagaagcaaccatgagatataattgcatccacaatcttgcatttttctactttggtaggtggtaggaatctgggggaagtgaagaaaggtgtctttggatcatagaattcaaatttaggaggctgttctgttagagcaagatttgcatcaaagaaggactttatagttccaatatcttcccagtagtcattgaacaaatatgcctggacattgtgctcattcacagcagatgggataatttcagatccaaagtcattgcatgaagaacatttccatcttaatagttgcagcaaggtttcagttctaaacacgtagacacccatggatgcaatataaggatgtttttctgcttcttgtggcaataaccctaaaagagtggtgtcaacacgcattgcctttagatctgatcccttaggtttttctgcaaactgtataatccgtcctgttttatcaattttcatcagtccatagtctgatgcccgactgtcatccatgggtacacatgaaactgtgatatcggcatttgtgtcaacatgtctctgtacaaagtccatatagtccatacggtaaagatgatcgccagaaagtatcaatatatgctcaacattcttgttcttggcatcctcaaaaacccatataaattgtcttacagcatcagctgtcccttggaaccacttcttcccagcctcacccggtgtttgagtagctgccaagacctccacaaacccatctccaaaagtcatgccatttccgaagctgtatgcacgggacaggtggcggttgagagagaaagaattgaactgcgtcaagatgaaaatttttctgatgccactattgatgcaattgctcatggggatatctatgagtctataacaccctccaattggaaccgctggcttggctcttctgccagtaagaggaaagagtcgagttcctgcacctccacccaatatgatggaagccacactttttgggtccacttcaggtttctcaaaagtgggtaccccttgaaatgccgggggatctccgtcgatgtctgatgtgagaacagcgcgtgcaattccacttccaggcttggagtttctaagattcctattggttcgtgaagtcttgcatgattgaacactcaaaaacctttttgtgttcacacttcccctcgtactctcaccccagaagccacttgttctgtttcttccaattccctcactaactttggctagatggcggccattcagggttgcacaagctgaatccattgctaaatcaataacggaaatagaaacctttttggatttggtaactttctgctcaatggaatttgtatgagggaagagcatgtatgagggaagagcaaaactactttaataaagtaccaaacttttcagacaatttgtaccataagttgaggaatcataactggggagattcaagtgaaaagagccccaaaaagatgagatttttcagagaaacgaaggtgggacctaggaggtagaaactacgtacagaaaaatttggtaatggagaaggagaagatagaaatcgggcgcgtggtgnattggcaaatagcaagggacactacactaacgnnaacgactcacgagaaacntgcnaagtctttcgatctgtcactgagtcagcactccgcagtggntacaagtttntatgacttaccggctnactttcacacttcctcgggggnggggcctacgtag

SEQ ID NO: 8217 - DNA, 1391 bp, Glycine max
  misc_feature (1388)..(1388): n is a, c, g, or t
  misc_feature (1390)..(1390): n is a, c, g, or t
tcgagtcagctacgtaggcccccccccccactctctgtgcatatatttgtatttttaatttaaatttaaaaagatagaggaacagagatcctgataagatagaacgaaaagagagataaagttaaagaaattaaataccaccaatttcgcccacgaaagcctctctctcgttcgttgcttcaaacttcaaacttcaaactcctccgcggcttcccttctcgttcttcttcacagaaatggaggtagcagtggccaaagcgttgaaaccgagtttaaggagtgagttcatcgttcagaaaatgcactgcgaggatattttcagcctgaacgcgaacaccgtcgccgtcggcgaagatttctccgtggacgacctatttgacttctctaacggctctctgcacaacgaacaccaacaagagtgcgacgaagagaaacaaagtttatctgcttcgtcgcagtcacaggaccgtggagaagacgatagcaactccaattccaccggcgtttcctatgattcacttttctccaccgaattagccgttccggccggtgacttggaggacctagagtgggtttcacacttcgtggacgattcactcccggagctgtcacttttatacccggttcgttcggaggaagcgaaccggtttgttgaaccggaaccctcagtgaagaaaacgcctcgttttccgtgggaaatgaaaataacgagcaaggcgagaagcgtacggaataggaagcccaacactcgcgtgtggtcattgggcagcacgttgctctcgctcccgtcttcgccgcccacgaagaagcagaagaagcgggccgaggcccaggtccagcccgttggagtccagattcagcggcggtgcagtcactgccaggtgcagaagacgccgcagtggaggaccggcccactgggcgccaaaaccctttgcaacgcgtgcggggttcggtacaagtcgggtcggttattttcggagtatagaccggcgtgtagtcccaccttctgcagcgatattcactccaatagtcaccgtaaagtgttagagattcggaagaggaaagaggtggctgaaccggataccggcttggcccagactcaaatggttcccacctgctgatattttattagagtctagggaaaaatttgcagtttaggaatacaaacccggtttgaaccggttcggtttttgtatgatatttagttagtgctagtgctaggcagtagtcacactagtcaggcaaccaaccgataatattaggaattactagtaattaggcatttattgtttgtatttgtaaggttgtattgtattgtatcccatttacttagtgttgttgattttatttaatttaatacatagtttaagttaacttgaagaaaaaanana

SEQ ID NO: 8218 - DNA, 1063 bp, Glycine max
cccacgcgttcgaccaaatcatattaagccatggccacctccaacttctcaattgttctctctctctccctagccttctttctagtgctactcaccaaggcaaactcaaccaacaccgtttctttcaccgtcagcaagttttccccacgccaacaaaaccttatcttccaaggagatgctgctatctcaccctccggggtgttacgactcaccaaggttgacagcatcgacgtgccaacgacgggatccctaggacgtgccctttatgctaccccaatccagatttgggacagtgaaacaggcaaggtagctagctgggctacatcgtttaaattcaaagttttctcgcccaacaagacggccgacgggcttgccttcttcttggcgcccgtcgggtccaagccccaatccaaaggagggttccttggtcttttcaatagtgactcaaagaacaagtcagtccaaaccgtggcggttgagttcgatacttattataacgcaaagtgggacccggcaaaccgacacattggcatcgacgtgaactccatcaagtccgtcaaaacggcgtcgtgggggttggccaacgggcaaatagcacagattctcattacctatgacgccgacacgagcctcttagtcgcttctttgatccacccctcacggaaaacgagttatatcctctctgagacagtgagcttgaagagtaatcttccagaatgggtgaatattgggttctctgccaccaccgggttgaataaaggcttcgttgaaacccatgacgtgttttcttggtcttttgcttccaagttgtcagatggtagcaccagtgatactttggatcttccaagctttctgctcaatgaggccatctagcttccaacgtcgtaagtagttaaatgtgacagaagaataacaactaaatagcgctctagcttgctagaggctagtactactaataatgtttatctgtcacaaaaattatcgtaatttgaaataataattggttttttactccatcatactaaaaaaaaaaaatatccaagcgatctacactatttaaaaa

SEQ ID NO: 8219 - DNA, 3059 bp, Glycine max
gaacaaaatgccacatgaataagggttttttgatgtgttattgcctcgctcctactccctccatcatccgatttaacagtgcatcggatttgatagatgaagctaaaaatgctggtcaacaaggtcttgcggggattttggtgtggatgagattcatggctactaggcagctcatatggaacaaaaattacaatgtgaagccacgtgagataagtaaagcacaggataggcttacagacttgctccaggatgtttatgcaagttacccacagtatagggaaattgtgaggatgatcttgtcgactgttggtcgtggaggtgaaggagatgtcggacagaggattcgggatgaaatccttgttatccagagaaataatgattgtaaaggtggaatgatggaggaatggcaccagaaattacacaataatactagtcctgatgatgttgtaatctgtcaggcactaattgattatataaatagtgactttgatattggtgtttactggaaaacattgaatgcgaatggaataacaaaagaacgacttctgagctatgaccgtgccatccattctgaaccaaattttaggagagatcagaaggaaggtcttctgcgagatctgggaaactacatgaggaccttaaaggcagttcattctggtgcagatcttgaatctgctatttcaaattgtatgggctacaaatctgagggtcagggcttcatggtaggggtgcagataaatccagtgccgggtttgcctaatggttttcctgaattacttgagtttgtcgccgaacacgttgaagagaaaaatgttgaaccacttcttgaggggttgcttgaggctcgtcaggaactccaaccatcactcagtaaatcccaaagtcgtctgaaagatcttatatttttggatgttgcccttgattctacagttagaacagctgtggaaagaagttatgaggaattaaacaatgctggacctgagaaaataatgtacttcattagcttggtccttgaaaatcttgcactgtcatcggatgacaatgaagatcttatctactgtttgaagggatgggatgttgccttaagcatgtgcaagagtaaagatactcattgggcattgtacgcaaaatcagtccttgacagaacccgccttgcactcacaaacaaggctcatttataccaggaaattctgcaaccatcggcagaatatcttggatcactgcttggtgtggacagatgggctgtggaaatatttactgaagaaattatccgtgctggatctgctgcttctttgtctactcttctaaatcgactggatcctgtgctccgaaagacagctcatcttggaagctggcaggttattagcccagtggaaactgttggatatgttgaggtcatagatgagttgcttgctgttcaaaacaaatcatatgagcgacctacaattttgatagccaagagtgtgagaggagaggaagaaattccagatggtacagttgctgtcctgacacctgatatgcccgatgtcctatcccatgtatctgtacgagcaagaaatagcaaggtgtgttttgctacatgctttgatcccaatatcctggctaacctccaagaaaataaaggaaagcttttgcgcttaaagccaacatctgctgatgtagtttatagtgaggtcaaggaaggtgagttaattgatgacaaatcaactcaactcaaagatgttggttctgtgtcacccatatctctggcccgaaagaagtttagtggtagatatgctgtctcatctgaagaattcactggtgaaatggttggagctaaatctcgtaatatctcttatttaaaagggaaagtagcttcttggattggaattcctacctcggttgccataccatttggagttttcgaacatgttctttctgataaaccaaaccaggcagtggctgagagggtcaataatttgaaaaagaagttaattgagggagacttcagtgttctcaaggagattcgtgaaacagttctacaattgaatgcaccatcccatttggtagaggagttgaaaactaaaatgaagagttctggaatgccgtggccgggtgatgaaggtgaacaacgatgggagcaagcttggatagctataaaaaaggtgtggggctctaagtggaatgaaagagcatacttcagcacaagaaaagtgaaactcgaccacgaatatctttccatggcagtccttgttcaagaagtgataaatgctgactatgcttttgtcatccacacaactaaccctgcctctggagattcatcggaaatatatgctgaggtggtaaagggacttggagaaacactggttggagcttatccaggtcgtgctttgagttttatctgcaagaaacgtgatttgaactctcctcaggtcttaggttatcctagcaaacctgtcggcctatttataagacggtcaattatttttcgatctgattccaatggtgaagatctagaaggttatgctggtgcaggtctttatgacagtgtgccaatggatgaagccgagaaggtggtgcttgattattcttcagacaaactgatccttgatggcagttttcgccagtcaatcttgtccagcattgcccgtgcaggaaatgaaattgaagagttgtatggcactcctcaggacattgaaggtgtcatcaaggatggaaaagtctatgttgtccagaccagaccacaaatgtagacctccatacctatgtcttctaagccaactacctcaactatgttctatgttcattcccgtgcaacatggcgtttcaaacgtggccgtggcagcttctgcgagtttaagagtaacccgcgggattaccaaatttggccttatagatttattacacgtgatatattgaaaattaaggaataatttataagtgtataaacatggaataatgtaaattaattaaaaaattagatggtcttattctttttccctactatatatattgtatctacttacttcttcctaattaaaattgctattcaaagtatctttctagaaaaaaaaaaaaaa

SEQ ID NO: 8220 - DNA, 2769 bp, Glycine max
  misc_feature (2612)..(2612): n is a, c, g, or t
  misc_feature (2631)..(2632): n is a, c, g, or t
  misc_feature (2651)..(2651): n is a, c, g, or t
  misc_feature (2663)..(2663): n is a, c, g, or t
  misc_feature (2665)..(2665): n is a, c, g, or t
  misc_feature (2681)..(2682): n is a, c, g, or t
  misc_feature (2689)..(2689): n is a, c, g, or t
  misc_feature (2695)..(2695): n is a, c, g, or t
  misc_feature (2697)..(2697): n is a, c, g, or t
  misc_feature (2708)..(2709): n is a, c, g, or t
  misc_feature (2747)..(2747): n is a, c, g, or t
  misc_feature (2749)..(2749): n is a, c, g, or t
  misc_feature (2752)..(2752): n is a, c, g, or t
  misc_feature (2756)..(2756): n is a, c, g, or t
  misc_feature (2760)..(2762): n is a, c, g, or t
  misc_feature (2767)..(2767): n is a, c, g, or t
gtaaactcaaactccggctccagctcagaggaatctactactgctactggtttgaagatttgtttcacctttcattcccttgttggtggccttcttagaagattttgtccgttcatgtgtttcccaccctagtacccttgacatatttggctcacatcatggattatattttattatatgatgattttggtttgattacatcatatgcaggcagttcattccggtgcagatcttgaatctgctatttcaaattgtatgggctacaaatctgagggtcagggcttcatggtaggggtgaagataaatccagtgccgggtttgcctactggttttccagaattacttgagtttgtcatggaacacgttgaagagaagaatgttgaaccacttcttgaggggttgcttgaggctcgtcaggaactccaaccatcactcagtaaatcccaaagtcgtctgaaagatcttatatttttggatgttgcccttgattctacagttagaacagcagtggaaaggagttatgaggaattaaacaatgctggacctgagaaaataatgtacttcattagcttggttcttgaaaatctcgcactttcatcggatgacaatgaagatcttatctactgtttgaagggatgggatgttgccttaagcatgtgcaagattaaagatactcattgggcattgtacgcaaaatcagtccttgacagaacccgtcttgcactaacaaacaaggctcatttataccaggaaattctgcaaccatcggcagaatatcttggatcactgcttggcgtggacaaatgggccgtggaaatatttactgaagaaattatccgtgctggatctgctgcttctttgtctactcttctaaatcgactggatcctgtgctccgaaagacagctcatcttggaagctggcaggttattagtccagttgaaactgttggatatgttgaggttgtagatgagttgcttactgttcaaaacaaatcatatgagcgacctacaattttgatagccaatagtgtgaaaggagaggaagaaattccagatggtacagttgctgtcctgacacctgatatgcctgatgtcctatcccatgtttctgtacgagcaagaaatagcaaggtgtgttttgctacatgctttgatcccaatatcctggctaacctccaagaatataaaggaaagcttttacgcttaaagcctacatctgctgatgtagtttatagtgaggtcaaggagggtgagtttattgatgacaaatcaactcaactgaaagatgttggttctgtgtcacccatatctctggccagaaagaagtttagtggtagatatgctgtctcatctgaagaattcactggtgaaatggttggagctaaatctcgtaatatctcttatttaaaagggaaagtagcttcttggattggaattcctacctcagttgccataccatttggagtttttgaacatgttctttctgataaaccaaaccaggcagtggctgagagggtcaataatttgaaaaagaagttaactgagggagacttcagtgttctcaaggagattcgtgaaacagttctacagttgaatgcaccatcccagttggtagaggagttgaaaactaaaatgaagagttctggaatgccgtggccgggtgatgaaggtgaacaacgatgggaacaagcttggatagctataaaaaaggtgtggggctcaaagtggaatgaaagagcatacttcagcacaagaaaagtgaaactcgaccacgaatatctttccatggcagtcctggttcaggaagtgataaatgctgactatgcttttgtcatccacacaactaaccctgcctctggagattcatcggaaatatatgctgaggtggtaaagggacttggagaaacactggttggagcttatcctggtcgtgctttgagttttatctgcaagaaacgtgatttgaactctcctcaggtcttgggttatcctagcaaacctgtcggcctatttataagacagtcaattattttccgatctgattccaatggtgaagatctagaaggttatgctggtgcaggtctttatgacagtgtgccaatggatgaagccgagaaggtggtgcttgattattcatcagacaaactgatccttgatggtagttttcgccagtcaatcttgtccagcattgcccgtgcaggaaatgaaattgaagagttgtatggcactcctcaggacattgaaggtgtcatcaaggatggcaaagtctatgttgtccagaccagaccacaaatgtaaacttgcatacccatgtcttctaagccacctacctcaactatgttcatccccgtgcaacacgtcgtttcaaacgtggccgtggcagcttctgtgagttcaagagtaacccccggattaccaaacatggccttatagatttattacatgatatattgaaaattaaggaataagtgtataaaaacggaatattgtaaattaagaaaaatttagacggtcttatatattctttttccctactatatacaatatagtgtatctagttacttcttcctaatcaaaattatatttttacttgaaaaaaaaaaaatccgcanccggggatcccttttcttnncggccccccgggggacccnctttgtcctttngnggtaattcacctgggnnactggcntctgtncnggaatggttcnncaatccccatatcaacgaactaaggaaaccgggcctangnccncccntttnnnccccncc

SEQ ID NO: 8221 - DNA, 1158 bp, Glycine max
caaaataaaatttttaaaatttaatatatcaaaacaaaataattacaaaacataaacaaaaagggataccatattaagccttccttttaagagatacttagactctgctcttccaaattgatagaaattatatatacaagcaaaaataaaaacccctaagccaatcaaaattgtatcacagtaatttgaactttttataaagttacagcttggcctagttcacagaaatctctctgcatttccacaaatcaactcttctaagaatacataatccaaaaaacgctacacagtctatagcactgaagatgtaaattacatatgcgtcagtcatatcttgtgtaatcttttttctttggaggatggggctccagaatcttctacgttttaaaagaggtcctacgagcattcgatatctgattcatctggtccatcgatgtaaagttcaaactcatcgggactccatctgcaaattaagctaagtcgaaatgtagccatcttgattcccattaaacgcagtatacgagaagcctcgggtgacaaaggctttccttcctcacaaacaacaaaatccgaaacaagctccacaactcctttatttaaccgaacaggcatgccttgcttcctgagaaaaggttccatctcatgggtgaattgctctaatggaccctctttgagatccaccttttcagtggcattgcttcctgttcttgcaaagtcatactcctcaaattctttaaacagcctttcaacttcttcctttgacaaattggtgaaaaccatcccagaatctccacgcaatagctttgaaaccttatgaaggccgggtctgatctcatccgaagcagagcgacctaaagcaacttgcattactttgttagagccgagaaagaacctgctactcgatttcaactggtccctgaactccttgaatttctgattcctcatgttctcgaaagagaacacgtacacgtgcccgtacttttctgcagcatcttttattccgttcactatcgtctctttgtggtctcttccctttttcttcgtctttgaaagcgtaacttgtctatttctcttggattttggcattttgaagttgttctgttcgcagttgcaacttctccggctggctgtagggttttaggtttgtgattggtaggg

SEQ ID NO: 8222 - DNA, 1013 bp, Glycine max
ctctggtctttctacatctgaaccaagggcgttatcatctgggagtggggcaaacccgagatcagcttcatggttggagaggcaaggtgatagtgaatttggaattccttattcactacgtactttggctgttgcaagtgaaggaagtagtagacttgtatctgagctccgcaatgttttgggccttatgcgtagaggtgggaacgtgcgatttgaggatgttgtgatccttgagcatcaatcatttctttctggaatagctgatgttcatgatcgacacagggatatgcgacttgatgttgataacatgtcttatgaggagttgttggctctggaagagcgcattggaaatgtgagtactggattgagtgaggaaaccctatcgaaactcttgaaacagagaaagcactcggttgaaaaagggtctgagactgatgcagaaccctgttgtgtttgtcaggaggattatggtgatgggaatgatattggaacgcttgattgtggccatgatttccatagcagctgtatcaaacagtggctaatgcaaaagaatctgtgtcccatttgtaagacaacgggcttggcaacatgatgtatgtgactctctgtcctcaggcaaataccatgaccatgaaggaaaaaaaaaattggcacaatttacccaggaaattctggtgcttggtgccttgtcttctgtttctagcctagtaaattgtcgtacctgactgacagaggtttcccctaccctgcctccctcccccgaatttgtttatttattatctaaatccaaaggtctcccggtttaggtgatgaaggagcgcttcttaactcaagttgacaaggcttggtttacatttatgaaattttttaatattgttcggattggagttatgctgaacggaaaactaggtacaaaaaatatgattcaaatataagaatcattggtactggatttacgcgtttggggtgattttatttacttattattattattcaaaaaaaaaaaaaaaaaa

SEQ ID NO: 8223 - DNA, 778 bp, Glycine max
cgtgcttagggggttgagcccgagaagggaacttggttgttgctcaaagcctattaagggttgttggttttggaataagtaggcagagggggtgtatgtggagaaactggggtgtggaggtagtaaaggagagtaagaggaaggtgatggtgaatctgaggagagaatagagggagttgaggaaggacaagttttcataaaaggttctagaacttccatgagctctcctctgaatggatctgactgaacttgttgtgatgtttcgttgtagaaattcatcgtagctgccatataaaaattcaattttccaactacacacacagatcttagattaaaaaaatcaacctgtggtttttaaatattacaacaaaaaaggatgggagaggtttaaaatagacaaccccttaaatccaagaaagaaaaaaagaaagagagcttttgagggatcaaaaacaaccctcgcggctgaacgaaagaaaataataattttttaaaaacaaacaaaaaaaaagctggatctcgattctgaaaacacctggctttcgagaaaatttttcaaagtttgaatctttttggtgaggcaaacccaaaaaatcacgagttgaaagacagatgattaacagaaagggattcagagaagcggggagtaacagaggggggaagaaaataagagattagaagattagagaaaagaaagtgagaaccacagaaaatgaagagaagagaagagaagagaagtgtgtgtttggtgagaaactctctctgggcgaccccgtgg

SEQ ID NO: 8224 - DNA, 1203 bp, Glycine max
ggttctagaacttccatgagctcacctcggagcgaaccggcctccactttttttttttaatttcccttcctcttctttactttctccacaccccaatttctacacacacactccccccccttcctacttactccaaagccaacaatccttaataggctttgagcaaccaccgagttcccttctcgggctcaaccacctaagcccgtctcagatttctcagatccaggcccagatcgaggcccaacagagccaaaaccagaacccacactctctcaactttctcggcccgaagcccgtcccaatgaagcacgtgggcgggcctccgaagcccacgaagctgtaccggggcgtaaggcagaggcattgggggaagtgggtggcggagatcaggctcccgaagaaccgaaccaggctctggctcggaaccttcgacacggcggaggaagctgctttggcttacgacaaagccgcgtataggctccgaggcgacttcgcgaggctgaacttcccgagcctgaaaggctcgtgccccggggaggagtacaagcctgtgcattccgcggtggacgctaagctcgacgcgatttgcgccaacttggcggaaatgcagaagcaagggaagacggagaaaggtgccaggtcagcgaagaaatcgaagcaaggtccgaaccaggaggccaagcccgaacctcaagcttccgctgaaagtgagggttctgcggattcttctccgctgtctgatcttacctttgatgtaaccgagccgcaatgggaacattttaatttgcagaagtttccttcttatgagatcgattgggattctctctgaacttcgtctttgtttttatgtctagtcttgtggctaataataataataatttaggttagtcttgctaggtggctgctgcaattgagtttttgaagattgcagtgcttcttgtaggatttcgatttttttttttttagcatttggttattggctatttggtcaatatgatgtaaatctctctaccttggtcagctgggttttttttttttttattattattttcttgcttggcctgggagaatgacttctagccttctaggtgttgtctatgctttgatgttcatccaagtatgttattattattattattgttgttgatgtaattcaattttatttgcatctcagaatttatgaatatatttgtatttcagctt

SEQ ID NO: 8225 - DNA, 1415 bp, Glycine max
acattggcaaaaaccatcatcaatgagcccaaggatcgtgctcgcttcgttggcccctcccccccccctaacatgcaggtgcactacatttccttttctgctcatgctgactctgctcaaacaagtgcgttcttagaagagctcaatcctcctaacataattcttgttcatggagaagctaatgagatgggcaggctcaagcagaagctcataagtcaatttgctgatcgcaacactaaaattcttactccaaaaaactgtcaatctgttgaaatgtatttcaattcgcagaaaatggcaaaaaccatagggaagctggctgaaaaaacaccagaagttggtgaaactgtcagtggtttgcttgtaaaaaaaggcttcacatatcagattatggcagctgatgatctccatgtcttttcacaactatcaacagcaaacattactcagaggattaccatcccttattcaggtgcctttaatgtcatacagcatagactcaaacagatatatgaaagtgtagctcagtcagtggatgaagaatctggagttcccacattgcaagtccatgagtgtgttactgtgaaacatgaatctgaaaagcatgtctccttgcattgggcctctgatcccatgagtgacatggtatctgattcaattgttgctctggttttaaatatcaaccgcgatgtcccaaaaatagtgaatgaatctgatgccattaagattgaggaagagaatgagaaaaaggcagagaaggttatgcaagccctcctcgtttcactctttggagatgtgaaggtaggtgaaaacggaaaattgataattaacattgatgggaatgtagcagagctaaacaaagaaagtggggaagttgagagtgaaaatgaaggtctcaaggaaagagtaagaacagcattccggcgcattcaaagttctgtgaagccaattcctgtttctgcgccatagtttttcatttccttacattttctttggaaaaggtgaaatgccaccgataaggaacaccagctcacatgtccccgctaacatgagacaattatcacaacatgttaccttcccttccctttaacatgatgagctttgtcacagcattctctgtttccttttgtttattcttcaaatatttggtcatttaatctaaacttattttcttcaaatgttatgttgttgcgtctttacattctctgcctgccggtttctgcctgatggtgcgtatctacaacactatagccgtgtagttttctgtttgttttgctccttagagactggaggctgttaccttcatttggcggttgctccgatgtccttgttattaaagcattatgattttcttttaattcaggcatgattatcttttgcttggaaatacagctttggaccttttggtttggtattct

SEQ ID NO: 8226 - DNA, 2370 bp, Glycine max
tacggctgcgagaagacgacagaagggggtgtattaggtttttttgcttcttctcatttgctaatagagagggacatgaagaagtaagatagggcatggggtgttggtggcacatataaaacggccaaaagcaatgcttaatttctcttatgctcttcagagtcggcttcattctgtgattcctccctccttttctcttcgcttggttcaagttgttacagtgttaaatttgaggggagtcatatttcttggttctgaaggccaccgttatggctgtacatacagaattccctcttattacttactcacaagagattgtagatggacagcctatttttgtctcttcaaactgtcttcctatcaaggctttgaaatttgaacctgcaggtcattctttccattctgctgcacttaaacttcttggtgttcaggaagataacaatgatgctgatgataaaaaagtggttgatgataaggaacaaacatatctcccatctgattcttatagcagcaagagcaaaaagaaatctggcactggagacatgcagcaggatcactatgcattattgggtctgggtcatctaaggtatcttgctacggaggatcaaattcgtaaaagctatcgtgaaactgccttgaggtttcatcctgacaaacaggctgctcttcttcttgccgaggaaactgaagctgcaaaacaaccaaaaaaggatgaaatagaaagtcactttaaggcaatccaagaagcatatgaagtgttgattgatcctgtaagagaagaatctatgattccacagatgagtttgatgatgagattcccactgattgtgctccacaagacttcttcaaggtgtttggtcctgcttttatgaggaatgggcggtggtcagttaatcaaccaattccatcactaggtgatgataatactccgttaaaagaagttgataatttctacaatttttggtactcctttaaaagttggaggcagcttcctcggcccccccccccccatcttgagcaagctgaatctcgagaccacaagagatggatggaaaggcagaatgcgaaattgacagaaaaagctaggaaggaagactatgcacggatacgcactcttgttcagctacgtaggacccccccccccagaattttgagaagaaaggaagaagaaaaagctgagaaacaaaggaaaaaggaggctaagttcctagctaagaagttgcaggaagaagaggcagccagaatcgcagaagaggagaggcagcgaaaagaggaggaagagagacaagccacagaagctgctttacaacagaagaaggtgaaagagaaagagaaaaagctcttgcggaaggagcgagcacgacttcggactctttcaggacctattttatcgcaccatttacttgatatttctgatgatgatgtagaaaggctttgcatgtcactagatatacagcagctaaggagtctctgtgagaacatgggaggcagacagatgttattagagcaagcaaaagttttgagagatgcactgagttctaagaaagaagaggcggttgatgagaaaactaatcaacaaaatgccaatggttccatcaaggctaatggcagtccttcactaagcaacattgagaagaaggagaaaccctggagtaaagaagagattgatctattgaggaaaggaatgcagaaatatcccaaaggaacctcgcggagatgggaggttatttcagaatacattggtactggaagatctgttgaagaaatcatgaaggcaactaaaactgtactccttcagaaacctgattcgtcaaaagcttttgacacatttcttgagaaaaggaaacctggtgcacaatcaattgagtctccattgacaaccagagaagaattaggagtgccagctcctgcctcaacaaataacgtagaagactctcagaataaaagtacagataatcagaactcccctgctaatggagtttcttccagttcagaacaggatgtgtggtctgcagtgcaggaacgagcgctggttcaagctttaaaagtctttccaaaggaaacaagccagagatgggagcgtgttgcaactgctgtacctgggaagactgtgaatcagtgtaagaaaaaatttgcattgatgaaggagagtttcaggaacaagaaaagtgcagtctaatgttctgttgtgatattttagatttcactactaattttttcttaagagtataggctagagtcgaatatccatacatttctagttttcttatcgcattgattgcttttgataccgtactttgaacttggaattaatacatttacttttattgcttgaaatagcaaatatcattactcgtgactagttctctc

SEQ ID NO: 8227 - DNA, 2405 bp, Glycine max
  misc_feature (11)..(11): n is a, c, g, or t
  misc_feature (49)..(49): n is a, c, g, or t
  misc_feature (2125)..(2125): n is a, c, g, or t
  misc_feature (2294)..(2294): n is a, c, g, or t
taccggtccgnattcccgggtcgacccacgcgtcctttgtcgcgtgggngaagaagtaagatagggccgcgcggccggtggcacttataaaacggccaacaggaatgcttaatttctcttatgctcttcagagtcggcttcattctgtgattcctccctccttttgtcttcgcttggttcaagttgttacagtgttaaatttgagggacatgaagaagtaagaaagggcagcgggtgttggtggctcatataaaacggccaacaacaatgcgtaatttcttttctgctcttcagagtcggcttcattttgtggttgctccctccttttctcttcgcttggcaagtaaatgatgaatgagcgagcgcatagtgcagtgaatttaagaggaaacaacgtcttagggttttagcattgctgttcttgagttgtgttgagtctggagagagatgaataattgtacggcgaagagacgtgagaatgcgaggagcagcagagaggaagatcaactgatagtgactccattgggcgctggaaatgaagtgggtcgttcatgcgtctacatgtcctacaaaggcaagacggtcttgttcgattgtggaatacacccagcttactctggcatggctgctttgccctatttcgacgagattgacccttccacagtcgatgttcttctcatcactcactttcacttggatcatgctgcttccttgccctattttctcgagaaaaccaccttccgaggccgtgttttcatgacctacgccaccaaggccatttacaagctccttttgtctgattttgtcaaggtcagcaaggtctccgtcgaagacatgctttttgacgaacaggacatcaaccgctccatggataaaattgaggttattgattttcatcagacagtagaagtcaatggtattagattctggtgttatactgcaggccatgtccttggtgctgctatgttcatggttgacatagccggtgttcgagtgctttacaccggagactattcacgtgaggaagaccgccatctccgagctgctgagaccccacagttctcccctgatgtatgcattatagaatccacctatggtgtacagcaccatcagcctcgccacacacgcgaaaaacgcttcactgatgttatccactcaaccatttctcaagggggtcgtgtgttgattccagcatttgcccttggccgtgcacaggagctcctccttatccttgatgaatattgggcaaatcatcctgaactccagaatatacccatctattatgcttctccacttgcaaaaaaatgtttgactgtgtatgaaacatacaccctttccatgaatgacaggatccagaatgcaaagtcaaatccgttttcctttaagcacgtatcggctttaagtagcattgaagttttcaaagatgtaggaccatctgtggtgatggcaagccctggtggacttcagagtggcttgtcacgacaattatttgatatgtggtgctctgataagaaaaattcttgtgttttaccagggtatgtagttgaagggacattggcaaaaaccatcatcaatgagcccaaggaagttactctcatgaatggactcactgcacctcttaacatgcaggtgcactacatttccttttctgctcatgctgactctgctcaaacaagtgcgttcttagaagagctcaatcctcctaacataattcttgttcatggagaagctaatgagatgggcaggctcaagcagaagctcataagtcaatttgctgatcgcaacactaaaattcttactccaaaaaactgtcaatctgttgaaatgtatttcaattcgcagaaaatggcaaaaaccatagggaagctggctgaaaaaacaccagaagttggtgaaactgtcagtggtttgcttgtaaaaaaaggcttcacatatcagattatggcagctgatgatctccatgtcttttcacaactatcaacagcaaacattactcagaggattaccatcccttattcaggtgcctttaatgtcatacagcatagactcaaacagatatatgaaagtgtagctcagtcagtggatgaagaatctggagttcccacattgcaagtccatgagtgtngtactgtgaaacatggatctgaaaagatggcccctggattggcctctgaaccatgaggaatggaaccgaatcatgggggcccggtttaaaacaccccgatgcccaaaaaaggagaggaccgggcccttaaattggggaaaaaaaggaaaaaagggaaaaaggttttttnccccccccccttttcctttttgggaaagggaggggggggaaacccggaaatttgttattactctttgggggggggggccccacccaaaaaaaaaaggggggggaggtgggg

SEQ ID NO: 8228 - DNA, 1027 bp, Glycine max
cgtgggtttcactcggtcctccggattttaagggccgccgggggcgcaccggacaccacgcgacgtgcggtgctcttccagccgctggaccctacctccggctgagccgtttccatgggaggcagacagatgttattagagcaagcaaaagttttgagagatgcactgagttctaagaaagaagaggcggttgatgagaaaactaatcagcaaaatgccaatggttccatcaaggctaatggcagtccttcactaagcaacattgagaagaaggagaaaccctggagtaaagaagagattgatctattgaggaaaggaatgcagaaatatcccaaaggaacctcacggagatgggaggttatttcagaatacattggtactggaagatctgttgaagaaattatgaaggcaactaaaactgtactccttcagaaacctgattcgtcaaaagcttttgacacatttcttgagaaaaggaaacctggtgcacaatcaattgagtctccattgacaaccagagaagaattaggagtgccagctcctgcctcctctacaaataatgcagaagactctcagaacaaaggtactgatgatcagaactcccctgctaatggagtttcttccagttcagaacaggatgtgtggtctgcggtgcaggaacgagcactagttcaagctttaaaagcctttccaaaggaaacaagccagagatgggagcgtgttgcaacagctgtacctgggaagactgtgaatcagtgtaagaaaaaatttgcattgatgaaggagagtttcaggaacaagaaaactgcagtctaatgttctgttgtgatattttagattttattaaatttttttctcaagagtataggctagtttcgaatatccatatactagtttatgagccaaaatttctagttttcttatcgtattactattggttgcttttgataacgtacttttgaacttggaattaatacattcacttttattgcctgaaaaaaaaaaaaaaaaaaaaaaaaaaaagtcc

SEQ ID NO: 8229 - DNA, 3187 bp, Glycine max
ctcttataagcaaccccatctctctgtcccaatcccaacataccccccactggtccttttccattctttatacagacacacacaataaagaaaaagaaaaactacgttttcctttcactattctttttcaccctctccctctctcccatatatgatccaatatattgctataatacaatagaaccaacaactgtgacagacaaactctgagtagtacctcttttattctcctcctccttctctttcattctcaaaccactctgccatagtcttttctttcacctcttaatgaaacctcttggtttgtgtggttgaaacaaacaaagataagtcataataataaatcgggttggattcggaagggatgatggcggtgagttcagcctgcaaagatgggagcaaggtggcactggacaacggcaagtacgttaggtacacacctgaacaggtggaagcactggagaggctctaccatgaatgtccaaaaccaagttctcttcgccgtcaacaactcatcagagagtgtcccattctctccaacatcgaacccaaacagatcaaggtttggttccaaaaccgaaggtgcagagagaagcagcggaaagaagcgtcacggctgcaagctgtgaacaggaagctaacagcaatgaataaattactgatggaggaaaacgacagattgcagaagcaggtgtcacacctcgtctatgaaaacagctttttccgccaacagacacacaacaacaacgctacgcttgccacaacagacacaaacacaagctgtgagtcggtggtgacgagtggtcagcggaacttgacaccgcagcagcagcctccgcggggtccctgccctgcaggacttttgtccattgcagaggagactttagcagagtttctttcaaaggccactggaactgctgtcgagtgggtccaaatgcctgggatgaagcctggtccggattccattggaatcgttgctatttctcacggttgccctggagtggctgcacgtgcttgcggccttgtgggtctagaacctaccagggttgccgaaatcctcaaagataggctctcatggtttcgtgattgccgaactgtggatgttctaaatgtgatgtccactggaaatggtggaactattgagctgctttacatgcagttgtatgcgccaacaactttggcacctggtcgtgacttctggttgctgcgctacacatcacttttggaggacggtagttttgtggtctgtgaaagatcacttaacaacactcagaatggtcctgctatgcccccagtgcagcattttgttagagcagacatgctgccaagcgggtatttgataagaccctgcgaaggagggggatccattattcatattgtcgatcatatggttctagagccctggagtgtacctgaagttttgcgcccactgtatgagtcatcaatgctgctagctcaaaggacaactatggcggccttacgtcatttgaggcaaatttctcaagaggtttctcagccaagtgtaactggatggggaagaaggcctgcagctttgcgtgcactgagtcagagattgagcaagggctttaatgaagcagtcaatgggtttgcagatgatggctggtccatgttagagagtgatggcattgatgatgtcacccttcttgtgaattcctcacctagcaagatgatgggagttagccttgtctataacaacaatggatttccttctgtgagcagttctgtgctatgtgccaaagcatccatgttgctgcagaatgtccctccagcaattcttcttagattcttgcgggagcaccgatcagaatgggcagacagcagtattgatgcttactcagctgctgccatcaaagctggtccctgtagcttgccaggggcccgatcaggaggttttggcggtcaggttattcttccactagctcacacaattgagcatgaagagttcatggaggttatcaagcttgaaaacatgggctactatagggacgacatgagtatacctggtgatgttttcctcttgcaactttgcagtggagtggatgagcatgcggttggcaccagtgcagaacttgtttttgctccaattgacgcatctttctctgatgatgcacccattttaccttctggttttcgcatcatacctctagattctggcacagatgctgctagtccaaaccgtacacttgatttggcttctgcacttgaggttggcacaacagcaaacaaagcagctagtgacaactcagctcattctgggagcacaaagtctgtgatgacaatagcattccagtttgcattcgaagttcaccttcaagagaacatagcaaccatggccaggcaatatgttcgtagcatcattgcatctgttcagagggtttcattagcactttctccttcgcgctttggttctcacaatgcttttcacttaccacctggcactcctgaggcacaaacacttgctcgatggatctgtaacagctatcggttctatcttggggtagaacttctaaaatgtgaaggcagtgagtccattctcaagtctctttggcatcactcggatgcagttttgtgctgctctttaaaggcattacccgttttcacgtttgcaaatcaagctggacttgacatgcttgagacaactttggttgcacttcaagacatcactctggaaaagatttttgatgacaatggaaagaaaactctgtgcactgagttcccccagataatgcagcagggtttcatgtgtattcaaggtggtatctgtttatccagcatgggaaggccagtgtcctatgagagagcagttgcatggaaagtgttaaacgaagaagaatccgcccattgcatctgttttatgttcatcaattggtcctttgtctaatatattaaacagtattaggatgtaggaaagaaaagtagagcacaagagtacctaactttggcgaatccctagaatgctttaaaactctagtgggcatatgcgccaccaagatctatctatggccccatttgttttatttttaaaattttttttttcagtcgctccttattttcttttatgcttctttaatattcgtgcatatcacttttttttagttatgttttttcatattctaatattaataattcatgtcataaccacaagagcatggcataactttggctg

SEQ ID NO: 8230 - DNA, 694 bp, Glycine max
cttagttcataaggttgaggagtctgataaattagcagatatcaaagtggctgctgcctcagcacaggttgaagctgcaaaggccagcgaaaatgaagttctaaagaggttagaggaaactcaaaaggaaattgaggatatgaagagtgaaacacaggcagcgttgaaaagggctgaaatggctgaagcagcaaagagggctgtggagggtgagctcagaaagtggcgcgaacgagagcagaagaaagcagcagaagctgcatctcaaatattggctgagacactgatatccccagaactatctcctcagcactataggattcaaattcagaattcacctccaaacagggtggagatgaagaagttagaaaaggggaaggtgtcagtttcaaagaaagttctcttgcataatatcagtggcatctttcacaggaaaaggaaccatgttgagggagaatcttcttcttagcttccctgggagaatcatgtatgaaagatctcttgcttaattacagttttgtccagctcatgaatgtgagagatacatactggtttgtgtgaaagttgaaactactgcgatcagatttttgtcatcatagcatgagggacaagaattttgaaatgtcaatagtttggtcacaagtattttattaatgaaactttagtatattattgtaaaaaaaaaaaaaaaaaa

SEQ ID NO: 8231 - DNA, 2521 bp, Glycine max
tctcgagccgaatcggctcgagggataatctaccaaaatattccacagatattttttaaataaaccttaagctcaatcaaatttcaaacaacaaattaacaataagaacacgcaaacgcaaaggagctaagaggaagaggatgattgcgggttatgtttgattgatgtgttcagtgatcatcaatatgagaatgttgcctgtttgctcagccaccccacgttattccacatcttcccagattcccttgtttgggggattgcaccccattcgaaaggatcttgagagcagatgtgtggctgaagaaggtgtgcatttggcttcacaatatggagctcattcactgagaaattcatttgcagtgcaagctacaaagacagtattgggtagtttttcttctacaagtgaaccgggataccttacaagcacgtgggattatttaccagtgacaacagatgggcatcattctctgagtgatggggaagtcagacacatggaatattatcatctatctactgtgcctgatgaatttgcagattttgcagaacaggtaactgaaggatctaacacattagtgacaccagcacaaccagaaacactatcgactgctgatataatgccagagaactttgcaccaagtcctagttcaattaatgtggacaatgaatcattagtcagtacaaaagcaagtgttggagaccctggtgccgggatcattgaatccttcagtgcctcaatcaataagggagaaaatgctttacgaagctcactggatacagctacttcttttgtagattctattgttaaaactgcttcgacacctctacatacccccccccgtaaggcattttcttctgttgatcaaacaggggaattaacaaataagaagttaaccagcttttcaagtgagctgactggagtcacaaataaagcacctgctgtggctattgatgtgttgcgccgcacaattatagttgtagagagttctctaacaagtggggcttcatatgttgtctacctatatggctcagcaaaggagctccttccagcaggaattagggatacagtcaatgtatatgaagataaagcaacagaaatcttgaggccagttgggtctgcaactcaaaggttatacatggctgtctattcattggagaagagtcttggcttggatccaaatgacccaatcattccatttgttgttcttttaggctcttcagccacattatgggccttttattggttgtggacatatggaggttactcaggagatttgtcccctaaatcagcttttgagcttttggccgaggatgcaaatgctgcacttattgatgtccgttctgaggaaatgcgagaaaaatatggcattcctgatctccgacgggctgctaggtttcgttatgcaagtataactcctcttgaggttgatggctccatacgcaagttgttgaagagtggtagagaacttgatgattccttgattgctgctattattcgaaatttgaagatggttaaggacagttccagggttatagtgttggatgctgatggtactcgttctaaaggcattgcaagatccttgaggaaaattgggctcaagaatccatacttggttcaaggtggctttcagtcttggatgcaacaaggtctccgcatcaaggaactcaaacctgagacagcactttccatactcaatgaggaagctgaagcaattctggaggatgttagtccttctcctgggcaacttttaggttatggtacagtacttattgcagggctgtatgcattattagagttggagaagacattacagttaattggtgcatttggcctcggtttgaccatctatttgcgggtttcttcatatgaaaactcagaagatctaaaacaagatgtgaggttgttgctttctcctgttagacttggagctcaagcattttcatgggctgctggaaaattagaatcaaatggcttaggattacctacatcaccatcatcatcagatgttcagaaccgggtgttgcaggctgctgccaaacatgaatcccaaccatccgatagtgaaggtaaccaagatccagtacctgaaccgacagttcctctcaatcagaatgtatgagtcattccagattgtcatgtgctaacatgaaaattagaagagagattaatatggtcacagcaaatttaacttccatgattgaaagtttggaagttgacattatccaaacactgctgccacggactctgccctgcctgtaggcgttttgaatatatagaaaaagaagaagaaatatttcatgaggatgattatgtttgattttgttgcatgcatgccacgccaaaagtgctcggtacaatttccactgtcaaaataataagaatgtatttgcgtgatgcaatttgtaccaaaaatttgtggtggttcaacttatagtattgcaaactaatccttcaataaactcattgatggtttggtcttctatgaaatagtatgatccgtttgccaccggagcaccgcagtgg

SEQ ID NO: 8232 - DNA, 1217 bp, Glycine max
ctcgagccgaatcggctcgagcggctcgagacggctgcgagatagacgacagaagggggcaccagccaacaaaaaataaaacaacacataataagcaagcaaaacacacacaaaaggaaataccatatattatacacaaaccaaaccatatatcttattctattttctccctctccaccactccccttctttctcctcctcctcaaccttaatcatggagaatattggagaagagtacaagcattactgggagaccaacatgttcctccaaacccaagaacttgacagttgggggttggatgaggccttatctgggtactacgattcgagttccccggacggcgctgcttcgtctgcggcatctaagaacattgtttccgagaggaatcggaggaagaagctcaatgaaaggctttttgcgcttagatcggtggtacctaacattagcaagatggacaaggcttcgattatcaaggatgctattgagtacatccagcacttgcacgagcaagagaagattatccaagctgagataatggaacttgaatctgggatgccaagaaagagtccaagctatggttttgagcaagaacagcttcctgtggttctcaggtccaagaagaagagaacagagcagctatatgattctgttacttcaagaaacaccccaattgaagtccttgagctgagggttacatacatgggggagaaaactgttgtggtcagtttgacatgcagcaaaaggacagacacaatggtgaaactgtgtgaagtgttcgaatctttgaagctcaagatcatcactgccaacatcacttcgttttcagggaggcttttgaagactgtcttcattgaggcaaatgaagaagagaaagatcatttgcagataaagatccagacagccattaaagctcttaataatgaccctttaagccccatgagcatttgaggaagaaaatatataaattggggttctcattttggggtcactagtatataaatagaaagtttaggaaccgtgggttttataggagtttctcgtatttggtttcgttaccccctttttttcttcgcactcaacattccccttaatcaggactcttcttcaactttattatcagggaaagtttgctagtttcatccccttgtgtgcttagtgtatcaattaatgttattcttataataaaaagttcacttcacatcaaaaaaaaaaaaaa

SEQ ID NO: 8233 - DNA, 1230 bp, Glycine max
caaaaaataaaaacaacacctcataaaagcaagcaaacacacaaaagaaagtaccatatattatacataaaccttattcattcgccttcaaccaaaccatatatcttattctattttctctacctctctaccactctctttctttctccttctcctcaaccataatcatggagaatattggagaagagtacaagcattactgggagaccaacatgttcctccaaacccaagaacttggcagttggggattggatgaggctttatcagggtactacgattcgagttccccggatggtgccgcttcatctgcagcatcaaagaacattgtttccgagaggaatcggaggaagaaactcaatgaaaggctctttgcgcttagatcggtggtacctaacattagcaagatggacaaggcttcgattattaaggatgctattgattacatccagcacttgcacgagcaagagaagattatccaagctgagataatggaacttgaatcagggatgccaaagaagagtccaagttatgattttgagcaggagctgcttcctgtggttctcaggtccaagaagaagagaacagagcagctatatgattgtgttacttcaagaaactccccaattgaagtccttgagctgagggttacacacatgggggagaaaattgttgtggtcagtttgacatgcagcaaaaggacagacacaatggtgaaactgtgtgaagtgttcgaatctttgaagctcaagatcatcactgctaacatcacttcgttttcagataggcttttgaagatagtcttcattgaggcaaatgaagatgagaaagatcatttgcagataaagatccagacagccattaaagctcttaatgaccctttaaaccccatgagcatttgaggaagaaaatatataaatttggggggttctcattttggggtcactagtatataaatagaaagtataggaactgtggctttcataggagtttctcgtatttggtttcgctaccccccttttttcttcgcactcaatattcccatcaatcatgactcttcatcaactttattatctgggaaagattgcaagtttcatccccttgtgtgcttactgtatcaattaatgctacttataataaaagtgcatttcacatcatcgtggatcttttgttttaaaaaaaaaaaaaaaaaaaaaaaaaaaaaaaaaaaaaaaaaaaaaaaaaaaaaaaaaa

SEQ ID NO: 8234 - DNA, 2217 bp, Glycine max
cttcagtccaaagctgaatagcagttatgccccagatgctggagcagagaagttagcggactcaaagtcagctccagccagcccagctccaagtgatcaaattgctaaaccagctccttctaacagtggcatcagtgttcagtcagcaggtaaactttattcctacaaagaagtagccttagccccacctgggacaattgtgaaggtagtggctgaacagtcgccgaaaggaaatcctattcaactaaattctgaggtgagtgccatgatagttgcaacaaaggagactcaaaatatcatggcaacaacaaatgatgtggaagattattttcagaaatcaattgatgtgaaacagcaaagccctgtccatcaagaacaagaagaaaaggaaaccactgtggtgaaagataatacagaaacagtaaatagtaaggccaaagatgaggtttttgaagttaaactccaggaagctaacaatgttgccatactagagaagataactgaagttgcaaacatcacagtcgtggaggttgaggattctggttgcttagacaatagaaacaacagtgcctctaaaggtgcctcagagatacaagtgcaagaaagttgtcaagcaacttcccacgatttgaatcccctaaccattttagttgaaggcaaaaaacagttgttaattgacaatgatgtctctgtgtcgaaagatatggttacggagggagatgagaaacatgaatcatccagtgacaatgcagtaagtaatcctctaccatcagaaggagaaaagcaagaaacagaaacaggaaaggaaccaaccaagagactttctgcagctgcaccaccgtttaatccatccacaattccagtttttggctctgttcctgttccaggtttcaaagatcatggtggtattttgcccccaccactaaatatttctcctttgcttcctgtcagtcccccccgaagatctccacatcagtcagctactgccagggttccatatggtccacgaatatctggtggctataacagatatgggaaccgtgttccacggaataaaactgtatttctctctggtgaaccttcccctgatggtaaccccaacagccctcctagaataatgaacccacatgccacagagtttgtacctggccaacattgggtacctaatggctatgttgtgcctcctaacggatatatggcttctccgaatggaattccagcctcacctaatagttttcccccagtgtcttacagtgttatgcctgtgtcacccagtggatatcctgcttcactaaatggtgtccaagtgaatcaaaatgggttagcaacatctccaaccagttcaactgattcggcacaagttgtatatgttgaaactgaccttgaaaccaaaagtaaaactcttgatgaggaaaataaagattcattttcaacagatgtaagttctgaaaagaagcatgttgtgcaaaatgctaatgaattatctgccagcagtgaaaatccggaagtagaagaaaagcaggaagatctcagccccccatctggttgtagtaaagaggataaagtaaccaacaaggatgcagtagatgagaaaaagccaagcaagtgttggggagattacagtgacaatgaagctgaagtcacaagttaaggaatgataaacttttcttagtaaaatgattaaaaaaaaaaaagaaacatagcgaactgtttccttgcaagatgcctaccgagatacctaaaagtgatgccaaggattgactggactgaggaggtctttgaggcagaactgattacatatgaggatttctgaaaagtttcacccaacttggtacatatgggggttcaaatttatagcgtttcgtgaaggaggtcaccgtggccatagaaggggaaggctttgttgcatagctaattggcaatgtcttaaattgttttactttttttctgctacttttcttttgcttattcaaaatggaattctagctttgaggtcaaaatactcttgctcttacggctgataactaggttgcagttgcccgacaataaggcctcatttgtcaggccagtgtttgttttttcaagttgtagaagcagctcttacatcttacaattttgttcatattttgattttcttatggtaacagtgtttggcagtaaaagaagttttagatggagggatgattttcttcaaatcacgtcttggtgattcctcaa

SEQ ID NO: 8235 - DNA, 1995 bp, Glycine max
gtgatggatgaaactgaagtggaaaatcccatattcatggaaatggattccggcgcgcggagaaatgcaaatcaagtgtttgcatcagagaaaggagaaggtagcagtgttgttttctcaagagaagcaccacttatgaggaaagagtcaagaatgtccactccttattgttgcaatgctaagaagctcaaatccagggatgttacaacagattgtgagcttggaagtaatgagaaatttgggttggagaagaaactatgtagacaagacaggattgagttgggtcggttgtttcagagtgcagtgagttcccatgactgggaacttgctgaaagtttgattttggttgctgatccacagacgctcaatgatgccttgtgtatcacactggattccatctggttcttgagcacagagctagagcttaatggaataatgggatttatcaagaagatcattgctaatggtgcttatgacttcacaagagctgctctaaggacttcattccttgcttcatgtgtctctgcttgccagagtagaacaatgagtcttgctgatacagttactgtaatggcccaaaggttgcatgaacgtctccaggaatgcaatggagatgaagtattgaaggcagaagctggtgctaaggttcaaaagtttactgaatgggctctgaaatgtataggcatccattcacgactgcaggatgatagggaaaatgtgatacacagctcagctgttgaaatccagctccggttatctgccttcaagatgttcctcgatcttgctggcaaccgccttacagggaaggacttcagcgaggcctttgatgcggcttgttttcctcttactcttttctcaagctcatttgatccaggttgggcatttggcttgtcagctaccgtgatccaagggttgctgggcatgctagtggaggggggttcagacaatgtcaatcagtgtttcttggaggcttcacgttttggcagtacagaacttgtgcgcatactattgcagattgctcaaagaaacagcttggatgttgatgttgacttggcgttgggttttgcctcccattatggcaagataggaactatggagtgcttggtggaagagggaaatgccatagcctttttgggccctttgatgagagctgctgagaggggttgcatgcaagttgttgagtggtttgtgcagaggggttgccgagacatggaactatgccttgcccttacagctgccacttctagctgccaagttcacattgcagcttatcttctgccgcacgtacctcagcaggtccttgcagcacttagtgttgaaattcttaaggccgctggtgagcgcagcggtggatctcttgatggtgtagcatttcttctccaatctgacttcttaggtgatcctgcagctacttatgctgttgcagatattattgctaaatcagaggatgaggctgttgcgcctgagttgaagacttttcttaaggagcattggtcagaaggagcttacaaggagggattaaggttagggcaagagcattacatgaaccttgtgagaatcattaaatggggtgagtctcctatttgcttaagagatcttccggccccactgacggtggcaattgcttacctcccactttatagagagtgtgtcaagacaggtggctgcttgttttcacaacggcttaggggacaactggttgaagccgctaggagggttggaaatagggttttggatgaagtgacccatggtagagagctagtggtcgttttggaacagcatcttcctcactttttgctccatccctcccgcattgcttagctagactcggttgtcgatgttatgtattttttatttcctttcgacacccttctttattatgtaatgtatgctaccattgataacaatttttatcttggagttagcctttatggtaggattccctctttatagctcagagtattaaatgtgcatattttgtcgtaattgttgtct

SEQ ID NO: 8236 - DNA, 1441 bp, Glycine max
tcccacgcgtccgtacggctgcgagaagacgacagaaggggacttcccagttgctacctcaacgtccccaacactgtgttcctgttcttcttcttcgatggcggcaacctcaacatcactggcttctcaactctacattggcctgcgccgcccatgcctcaagcttgattctttcaattctcaatctttctctgtcttcgaccccaatcttcgcctatccctctctcctcccagaccctcacgcgccatcgtcgccatggcaggcaccggcaagttctttgttggcggcaactggaagtgtaacggaacaaaagactccatcagtaagcttgttgctgacttgaacagtgcaaaattggagcctgatgttgatgttgttgtcgcacctccctttctgtacattgatcaagtgaaaaactcactcactgagaggattgaaatatctgcccagaattcttgggtgggaaaaggtggtgctttcacgggagaaatcagcgcggaacaactaaaagatcttggatgcaagtgggttgttcttggacattctgagcgaagacatattattggagaaaatgatgagtttataggaaagaaagctgcctatgctttgagccaaggtcttggagtgattgcatgcattggagaattgttagaagaaagggaagctggaaaaacttttgatgtttgttttcagcaattgaaggcttatgcagatgcagttcctagctgggacaacattgttattgcatatgaacctgtatgggctattggaacgggcaaagtggccactccccagcaagctcaggaagtacatgtagctgttcgagattggctaaaaaagaatgtccctgatgaagttgcatctaaaacgcgaattatttatggagggtctgtaaatggagggaacagtgctgagctagcaaagcaagaagatattgatggatttctcgttggaggtgcttcattaaagggtcctgagtttgctaccattgtcaattcagtcacatccaagaaagttgcggcttgaacttgattacatattgtgattttggcaataagagagcattaaggatataaagacgggctagtcttaaatgtggcaataatatgggtgtacaataacagattggtttttattatcaaaattactgcgtcaatttctttgcaatcagtaggaattgcatcctctgagttttccaaagagccagtgtttttacagcaattagagatgcagagatggtagaaagcaataaataataaatgtttctggattaaaaaagttttttatatcgtcaaaaaaaaaatcctgtattttttattttttgcttttgattgtcaccgtcactgacggggtccagaatttttgtgactaaaaatgcaccttgtatgtttgttcactttctaaatatggaagttattgtaagttttaaaaaaaagaaaa

SEQ ID NO: 8237 - DNA, 1284 bp, Glycine max
  misc_feature (20)..(20): n is a, c, g, or t
tcgagtcagctacgtaggcnccccccttcaaatttacttcccaacactgtgttcctgtttttgttcttcgatggcggcaacctcaacatcactggcttctcaactctacattggcctgcgccgcccctgcctcaagctcgattctttcaattctcaatctttctctctcttcgaccctaatcttcgcctatccctctctccacccaaaccctcacgcgccgtcatcgccatggccggcaccgggaagttctttgttggtggcaactggaagtgtaacggaacaaaagactcaatcagcaagcttgttgctgacttgaacaatgcaaaattggagcctgatgttgatgttgtcgttgcacctcccttcctctacatcgatcaagtgaaaaactcactcactgagcggattgaaatatctgcccagaattcttgggttggaaaaggtggtgcttttactggagaaatcagcgcggaacaactaaaagatcttggatgcaagtgggttgttcttggacattctgagcgaagacatgttattggagaaaatgatgagtttatagggaagaaagctgcctatgctttgagccaaggtcttggggtgattgcatgcattggagaattgttagaagaaagggaggctggaaaaacttttgatgtttgttttcagcaattgaaggcttatgcagacgcagttgctagttgggacaacattgttattgcatatgaacctgtatgggccattggaacgggcaaagtggccactccccaacaagctcaggaagtacatgtagctgttcgggattggctaaaaaagaatgtctcagatgaagttgcgtctaaaacacgaattatttatggagggtctgtaaatggaggcaacagtgctgaactggcaaagcaagaagatattgatggatttctcgttggaggtgcttcattaaagggtcctgagtttgctaccattgtcaattcagtcacatccaagaaagttgcggcttaattacttattgtgattttggcaatatgagagcattaaggataaagacgggctagtcataaatgtggcaataatgtgggtgtataataacagattggtttttattatcaaaattactgccaatttctttgcaatcagtaggaatggcattatctgatttttccaaagagacagtgtatttatagcatttagacatgcagagatggtagaaagcaataaataataaatgtttctgaattaaaaaaaaaaaaatatcgtcaaaaaaaaaaaaaaaaaaaaaaaaaaaa

SEQ ID NO: 8238 - DNA, 1344 bp, Glycine max
ccaacacaaggataatctgtgactgtcttcaatccaagcttagattgttttactgttacaccattcctaggtaccatttgcaccactctttcttcttcaatcaatggcagcaacctcaacatccctcttctcctcaaatctccattctctcaactcacaacctttctcttcctcactctccttcttccgaaatgtccattccaccctctctttcccttcttctaaaccctcccgtggcgttgtagccatggctggctctggcaagttctttgttggtggcaattggaagtgtaatgggaccaaagactccatcagaaagcttgtctctgacttgaacagtgcaacattggagtctgatgttgatgttgttgttgcacctccttttgtgtacatcgatcaggtgaaaaactcaattacagataggattgaaatttctgcccagaattcttgggtgggaaaaggtggggctttcacgggagaaatcagtgtggagcaactaaaagaccttggctgcaagtgggttattcttggacattctgagcgaagacatgtaattggagaaaatgatgagtttatagggaagaaggctgtctatgctttgagtgagggtctgggtgtgatagcatgtattggggaactgttacaagaaagagaagctgggaaaactttcgatgtttgttttcagcaattgaaggcttttgcagatgtagtgccaagttgggataatatagttattgcatatgagcctgtatgggcaattggaactggcaaagtggccacacccgagcaagcccaggaagtccatgcagctgttcgtgactggcttaagaagaatgtatcggctgaagtttcatctaaaacgcgaattatttatggagggtctgtaaatgcgagcaacagtgctgagctcgcgaagcaagaagatattgatggatttcttgttggtggtgcttcattaaagggtccggagtttgctaccattatcaattcagtcacatccaagaaagttgcggcttaattacttattatggttttcaagagcgcattaaaaatgtggcaataacatgggtgtattatgagttttatttgtatcccttctatggctatgatacctgcgtttagtgtgctactttgaagaaataatcgtttatttttgtcagcacctagaggcttgagagaacttttgaaaaataaacgattatttctcaaaattcaagtgtttctaaacatgtaaggtatgagaaacattctccttttctcatgagccatgttttcttcatttcttggaacaattccatatacgaaaatgtgctaaaggcaataaatgttcctgaattgccgaat

SEQ ID NO: 8239 - DNA, 757 bp, Glycine max
  misc_feature (717)..(725): n is a, c, g, or t
  misc_feature (727)..(728): n is a, c, g, or t
  misc_feature (742)..(742): n is a, c, g, or t
  misc_feature (745)..(745): n is a, c, g, or t
caattgggtaccgggccccccctcgtgtccggacacaccacacaacattgttttctctttttgcatcgctattagggtttgcagagttgcactttccctttcttccaattcatgcgttttgttttcgattccctttctctatcacgccaaatcccaccgaatcgtgcgacgcggtatattggaatctcacttgggctctaattgatgcattcacaccgttagcggttgggctccaattctccaagatgagcaattctcactctgaaaatcatgatgaagtaactgtggcgggatttgaagttccaaaatctcctgattctagttataacaatgtctaccctggaaatgaagatgaggcaagggatccacctatggtcccttcacatttacagcatactttgctaaattatcctgctaatagagacactgcaggaactgttccattgcctcagaatgtgattctaaatcatctttacatcgagaatagagaatcaccaagatctgtggtggcgttgggattcactcatcgtttccactctaaatatgttacagtcgtgctttacaaaccagtccaaagaaggggaaatacaagcatttagtgtgcataatattaaaaacctcgatcaccgatggtttgtaatgatttgttgtagactccatattccaattactggagatgatatttttatggattctagaatgtttcttgggtaaaannnnnnnnnannaaaaaaaaaaaaanaanaaaaaaaaaaaa

SEQ ID NO: 8240 - DNA, 1390 bp, Glycine max
cgacgtgagcggttcgctgcccgcgacgttgtgagaagtccactgaaccttatcattaagaagaaggagaagcccaaaatgggaacaatggagagcttgaagttcttggtgtcttcaaagtacatcagagatcttgccactttagtggttgcttatggaatcagcatcaatcttgttgaggttacctggaagtctaagctcaaagctcagtttcctagtcccaacgagtactcttcttttatgggtgacttctcaactgcaactggaattgccacattcacaatgatgcttgtcagccaatttatatttgacaagtatggatggggagttgctgccacgatcacccctacagtcctgcttctgacaggagttggtttcttttctcttatattgtttgggggcccgcttgcacccggtcttgcgagtattggaatgactccacttctagcagctgtatatgtgggtgccttgcagaacatatttagcaagagtgccaagtacagcttatttgatccctgcaaagaaatggcctatattccattggatgaggataccaaggttaaagggaaggcagccattgatgttgtgtgcaacccattggggaagtctggaggtgccctcatccagcaatttatgatattgacttttgggtcactagctaattcaaccccatacttgggaggagtgcttctgctgattgtttctgcctggctagcagcggcaaaatccttggatacccaatttactgcattgcgtaaagaggaagaactcgagaaagagatggaacgagcagccgccgtcaagataccagtggtggctgagactgagagtggaaatggttctcttgcaactggttcaccactgaatccatcctcaggtgactcctcaagcagtccatctgaagcctcaactcctcgcaattaaaatgtgccttctttctgtgagaaattgcctcacagaatgagcaaatagagctcttttgagagcagtgttaggtgaaactatttgttgtaggtttatatataagctcttatagaataagcttgctagctactttctcaagtcacataatttttttgtcctcatagatcagatgattttctttacttgttaatcatggtttactgtttagtgaaccgcaatttgttttcctatgaaagatagaagtcatttcactgttctgtaatctgtatttcactgtttctagactctagtctgccctttgattgggtgataaggacttagcgtgggcttggccctgattttgggctttcatgagttgtttgcagcccacatgtgttcaaatcatgcccttctactaaggtagtaccacaatttgtcttggaaaagaaacccaccaacccctgcctgttccgaaaaaaaagaaaga

SEQ ID NO: 8241 - DNA, 1816 bp, Glycine max
aagtaccttatctctctatttctttgttcttcaactatcccaagggaactgagagagagagagagagagagaagtcatggacgctgttcttcaaaccagaggccttctctctctccccgcaaaccccgttaacagaatctcactctttaacccttcacaaggtttaaagcacagatttttctctccaaagccaaaaaacctttctgggtcttctctttcctccaatgggttcccaaaactctcaccaagacccaacaatgtctttgcccaaagggaccaaaacaaaaacttgttcttgtgcagggctgaggctgctgcagcctcctttggggaaccagaaagtgagaaacaaaagtttttgggtattgaagttgccaccttgaagaagattgtgcctctggggatgatgttcttttgcatcctcttcaactatacaatcttaagggacacaaaagatgtgttggttgtgacggccagaggaagcagtgctgagattataccgtttctcaaaacctgggtgaaccttcccatggccattgggttcatgttattgtacacaaagttggctaatgtgttgtccaagcaggctctcttctactctattattcttcccttcattgccttctttggggcctttggttttgttttgtaccctctcagcaactatattcaccctgaggcttttgcggataagcttctcaacatccttggcccacggttccttggtcctcttgcaattatgagaatatggagcttctgtttgttctatgtcatggctgaattgtgggggagtgtggtcatttcagtgctgttttgggggtttgccaatcagattactaccattgatgaagcaaaaagattctatcctctatttggacttggggccaatgtagcccttgtgttctctggtcggacagtgaaatacttttctaatctgaggagtactttaggtcctggagttgatggttgggccatctctctgaaagcaatgatgagcatagttgtgggcatgggatttgcaatctgtttcctgtattggtgggtgaacaattatgttcctcttcctacacgtagcaagaagaagaaggagaagcccaagatgggaacaatggagagcattaagttcttggtgtcttcaaaatatataagggatcttgccactttagtggttgcatatggaattagcattaatcttgttgaggttacatggaaatcaaagctcaaagctcagtttcctagccccaacgagtactcatcttttatgggagacttctcaactgcaactggaattgctacattcataatgatgcttctaagtcaatttatatttgacaaatatggatggggagttggtgccaagatcacccccaccgtcctgctattgacaggagttggtttcttttctcttatattatttggcggcccaattgctcctgttattgcaaagtttggaatgactccactgctagctgctgtatatgtgggtgccatgcagaacatattcagcaagagtgctaagtacagtttattcgatccgtgcaaggaaatggcctacatacccttagatgaggataccaaggtcaagggaaaggcagccattgatgttgtgtgcaacccattggggaaatctggaggagctctgattcagcagttcatgatcttaacttttggttcactagctaactcaaccccatacctaggaggggtccttctggtgattggtcttggctgggtatcagccggccagtcgcttgatacctcagttactggcttgcgctcgaaagaagaacttgagaatgagcttggaagggcagca

SEQ ID NO: 8242 - DNA, 2391 bp, Glycine max
acaatacagacatattctctccaatctgcacccacccccattccacctaccttatctctctctttctctttatcatcgcctctctctctcttaatcgttcttcacgagagagagagagactcacactagcacacatacatggacgccatcgttcaaaccagaggccttctttctctccccaccaaccccaaaaccagggtttcgcatcacctccatctatctcacggccttaaacaccgttttctctctctaaaacccaaacccctatccaccccttctctctccgccgccgccgccgttaaatttcatccctttggcccaaagccccaaaatttattcatctgccgggccgaggccgccgcggccgcagatgggccagcccagcccgccttcggggaacccgaggtcgccgaaaaacccaagcttttgggaatcgagatcaccaccctgaagaaaatcatccctctcggtttgatgttcttctgcatcctcttcaattacacgattctgagagacacaaaggatgttctggttgttactgccaaagggagcagtgcggagattataccctttctcaaaacgtgggtgaaccttcccatggccgttgggttcatgttgctgtacacaaagctagcgaatgttttgtcaaagcaagctcttttctactccgtgattcttccattcattgctttctttggggctttcgggtttgtgttgtaccctctcagcaactatattcaccctgaggcgtttgcggacaagcttctcaacatcctcggacctaggttccttggtccccttgcgatcatgaggatttggagcttctgtttgttctatgtcatggctgagttgtgggggagtgtggttatttccgtgctcttttgggggtttgccaatcagataactactatagaagaagcaaaacgattctacccactgtttggacttggggccaatgtagccctctttttctctggccggacagtgaaatacttttctaatctgaggcagaatttaggtcctggagttgatggttgggccatctctctgaaagcaatgatgagcatagttgtgggtatggggtctgcaatttgtttcctgtactggtgggtgaacaattatgttcctcttcctacacgcagcaagaagaacgaggagaagcccaagatgggaacaatggagagcttgaagttcttggtgtcttcaaagtacatcagagatcttgccactttagtggttgcttatgacggctgcgagaagacgacagaggggacatggaagtctaagctcaaagctcagtttcctagtcccaatgagtactcttcttttatgggtgacttctctactgcaactggaattgccacattcacaatgatgcttgtcagccaatttatatttgacaagtatggatggggagttgctgccacaatcacccctacggtcctgcttttgacaggagttggtttcttttctcttatattgtttgggggcccgcttgcacctggtcttgcaagtcttggaatgactccacttctagctgctgtatatgtgggtgctttgcagaacatatttagcaagagtgccaagtacagcttatttgatccctgcaaagaaatggcctacattccattggacgaggataccaaggttaaagggaaggcagccattgatgttgtgtgcaatccattggggaagtctggaggtgcccttatccagcaatttatgatcttgacttttgggtcactagctaattcaaccccatacttgggaggaatacttctgctgattgtttctgcctggctagctgcggcgaaatccttggatacccagtttactgcattgcgtaaagaggaagaactcgagaaagagatggaaagagcagccactgtcaagataccagtggtggctgagagtgagggtggaaatggttctctaacagctggttcaccattgaatccatcctcaggtgactcctcaagtagtccatctgaagcatcgactcctcacaattaaatgtgctcttctttctgtgaaaaattgcctcagaatgaaaaaatagagcacttttgagagaagtgttagatgaaactatttgttgtaggtttatatataagctcttatagaataagcttgctagctactttctcaagtcagataatttttttgtccccatagatcaggtgattttctttacttgttatcatggtttactgtttttagtgaaccgcaatttgttttcctatgaaagatagaagtcatttaactgttccgtaatctgtatttcaccctgtttcgacccttggcgccccttggtttgggtgataaggacttagcgtgggcttggccctgattttgggctttcatgagttgtttgcagcccacatgtgttcg

SEQ ID NO: 8243 - DNA, 1626 bp, Glycine max
ttttgaactgctttatgtgaattctaatgaatataaggtgtaaagatgaatatgatgctaacatgatatgtggttcttctgctgctgctttgtgaaggagaatgctaatattgactctttttttatttctttccagattactaccattgatgaagcaaaaagattctatcctctatttggacttggggccaatgtagcccttgtgttctctggtcggacagtgaaatacttttctaatctgaggagtactttaggtcctggagttgatggttgggccatctctctgaaagcaatgatgagcatagttgtgggcatgggatttgcaatctgtttcctgtattggtgggtgaacaattatgttcctcttcctacacgtagcaagaagaagaaggagaagcccaagatgggaacaatggagagcattaagttcttggtgtcttcaaaatatataagggatcttgccactttagtggttgcatatggaattagcattaatcttgttgaggttacatggaaatcaaagctcaaagctcagtttccaagccccaacgagtactcatcttttatgggagacttctcaactgcaactggaattgctacattcataatgatgcttctaagtcaatttatatttgacaaatatgggtggggagttgctgccaagatcacccccaccgtcctgctattgacaggagttggtttcttttctcttatattatttggcggcccaattgctcctgttattgcaaagtttggaatgactccactgctagctgctgtatatgtgggtgccatgcagaacatattcagcaagagtgctaagtacagtttattcgatccgtgcaaggaaatggcctacatacccttagatgaggataccaaggtcaagggaaaggcagccattgatgttgtgtgcaacccattggggaaatctggaggagctctgattcagcagttcatgatcttaacttttggttcactagctaactcaaccccatacctaggaggggtccttctggtgattgttcttgtctggttatcagcggccaagtcgcttgatacccagtttactgcattgcgccgagaagaagaacttgagaaagagatggaaagagcagcagctgttaagataccagtggtggccaaggatgaggatggaaatggttctcttaaaagtgttccactgttaaatccaacagctggtgactcctcaagtacattgaattgaactcaacttgcagtatttcaagcttaaactacattgaattgcaaggcaggaggagtaagccaaaactcatgagatttgttagcttaaactatttgttgtaggtcattatctcgtctgagtttgattgtcactttttttcaagtctttttattgttacttttgttctcacagataaatgattttattctctcaatatgaagctttcctattttgtagcacattttaaatttttttttgaaagaatgaacacatttgtaatttttgtttcaaataaatatgttcaatggttacaaggagctctggcaccacgttgtttttccaaccacaatgctcaagtacgagactttgcttaagaggatggaatgcaatgtgactccaaccaatgacttgttcgatcc

SEQ ID NO: 8244 - DNA, 1611 bp, Glycine max
agctacgtagggccccccccgtgcataaacccacaaacatggaaagtggaaacccatgcaaaaaagcgttcattaaaatccgcaaccaaactttctcagccaattaatcacatacatctaaactcgagctactactatcccccctcatgtgctacgtagccccccccccccacttattacccaaaagcttctgcacagtatcatgagtcccgcatggctattattgttgacccaaagtcttctggtggcggtgactacttcggaggccaagaacaatgtcccagccgtgattgttttcggagactcctcggtggattctgggaacaacaacgtcatagccactgttttgaagagcaatttcaagccttatggtcgtgacttcgaaggtggtcgtcccacgggacggttctgcaatggtcgtgtccctccagatttcattgctgaggcttttggcattaaacgtacggttcctgcatacttggatcctgcttataccattcaggatttcgccactggggtttgctttgcctctgctggaactggatatgataatgctacttctgctgtactaaatgtgataccactgtggaaggagatagagtattacaaggagtatcaagccaaattaagaacccatcttggtgtagaaaaagccaataagatcataagcgaagccttgtacttgatgagtttaggaaccaacgatttcctcgaaaactattacgtgttcccaacgcgaagactccacttcaccgtgtcacaatatcaggattttctactgcgtattgcggagaatttcgttagggaattgtacgcacttggagttaggaaattgtccataactggtcttgttcccgtaggatgtctccccttagagagggccacgaacatcttaggcgaccacggttgcaatcaggaatacaacgacgtggctttgagcttcaataggaagttggagaatgtgatcacgaagcttaatagggagcttccacggttgaaagcgttgtcggcaaatgcatattccatcgtcaatgatatcatcacaaaaccttccacatatggatttgaggttgtagagaaggcgtgttgttcgacaggaacatttgagatgagctacttgtgcagtgacaagaatccacttacatgcacagacgccgaaaagtacgtgttttgggatgcatttcatcctacggagaagacaaatcgcattgtctcaagttatttgattccaaagcttctagaaacctttagatgatgattatccattattttccatttgaaaaatcacatagtcttgcctagggcgacatgaaaaaaaatacatttagcgagatttaatgtcgggttgccatgcttgatatggatactttttttgtgtgttcaattgttataacaaataaatttacacctgaaatcatgtagtcatgtacacccacatttgaccttttgtaccttcccatgctatactgtgcttgggttttttcttccgaaaaaaaaaaaaaaaaaatgccaactattgtctattgatgtttggcttttttttatatgtggataattagtgggtagtaattaagaaaagttttgaaggaaaaaaaaaaaaaaaaaaaaaaa

SEQ ID NO: 8245 - DNA, 1303 bp, Glycine max
acttatgacccaaaagctactactaacatgagtcccgcatggctattattgttgacccaaattcttctggtggcggaggcaaagaaaaatgtcccagcggtgattgttttcggagactcctctgtggattctgggaacaataacgtcatagccacggttttgaagagcaacttcaagccctatggtcgtgacttcgaaggtggtcgtcccacgggacggttttgcaacggtcgtgtccctccagatttcattgctgaggcttttggcattaaacgcgcgattcctgcatacttggatcctgcttttacaattaaggatttcgccactggggtttgctttgcctctgctggaactggatatgataatgctacttctgctgtactaaatgtgataccactatggaaggaattagagtattacaaggagtatcaagccaaattgagagcccatgttggtgtagaaaaagccaacgagatcataagcgaagcgttgtacttgatgagcttgggaaccaacgatttcctcgaaaactattacgtgttcccaacccgaagacttcacttcaccgtgtcacaatatgaggactttctattgcgtattgcggagaatttcgttagggaattgtacgcacttggagttaggaaattatccataactggtcttattcccgtaggatgtctcccattagagagggccacgaacatctttggcgaccatggttgcaacgaggaatacaataacgtggctatgagcttcaataagaagttggagaatgtgataacgaagcttaatagggaccttccacaattgaaagctttgtcggcaaatgcatattccatcttcagtgatatcattacaaaaccttccacatatggatttgaggttgtagagaaggcgtgttgttcgacaggaacatttgaaatgagctacttgtgcagtgacaagaatccacttacatgcacagacgccgaaaagtacgtgttttgggatgcctttcatcctacggagaagacaaaccgcattgtctcaaattatttgattccaaagcttttagcaacctttagatgatgatgatccattattttccatttaaaagatcacatagtcttgcatagggcaacatcaaaatatacatatagcaagatttaatgtcgggttgtcatttttttaaatgaatttatctttacattttctattgaactgtaattatatatggaaataaattttgaaaaacatgtcacttgatataaatttaaggatcaaattcaacctttgatcttttatttatgttttatcttaaaaa

SEQ ID NO: 8246 - DNA, 765 bp, Glycine max
accccgtacgggcgagaagacgacacgcggggactcacattcattcattcactcaccccaaaacccaaaaacctttccttttactttttctcaaactgaaacataaaaaatggagggtcttattccttttgtttacaaggctatcatgcaatccaagggcgacaaagagggtcatcctataggatcatggctttgtgagtctccttactcatacatgagacttcctggtgactcgggtaggtttcaaattcaagcaccagctgctgcttcaccctcttccaccaaccctaattcttcttctgctacacaaatcattgtttcctctggtgttcagtccccacatcagtgtttaacacatcgtcgaattgcagcatgaaaatgaacaagtttgtgcctgaagaaaaagccgaaggtgcttaattcaagagttcaagtttgtgctttcaagtgttgggaatcttggttctttgtttcaacttaatttggagttgtaagcgtgtggaaaacaacaaccaaaagggtctcatacgcttattaggtagtggtggtatttcagtatttgtaattacgttgtagatatgggtttctcatgcttaagaaattgttcgtgttttatgaccaaagggtcacttgaactatatgagtttttagacaaaataatgagcaaaatgtaataggtttattgttgtagaataaagcaaataatcaatctgcaattgttcgttgtttattattttccgatttccgactttaaaaaaaaaaaaa

SEQ ID NO: 8247 - DNA, 1677 bp, Glycine max
  misc_feature (1066)..(1066): n is a, c, g, or t
tcagctacgtaggcccccccccccgatggaatgagattgcaacatggtagacaagagaatctgtcacagaaatgaagataaaagatttagtcaatgtgtcaaagacttagcttagctcagctcaaatcacaacctcggtgttctttctctcaatttcttctcataattgccatctccaaaaccttcacgaaccgcacacccaaatccaacatcctacgaatttttacacttctctcgagccatgaagaatcctttttctttttgcacttgtttctcagcatcgatcaaagaacaaaccaagcacgaattatggattgcatctgtaattacccaacagaggagccagatgaagataataatgatggcaactttcgcttattcacgtatagagaattgaattctgccacacgtggttttcacccatcggaaaagattggagaaggaggctttggcactgtctacaaggggcagcttcgggatggaactttggtggcagtgaaagtgctttcaattgagctagattccttgagaggagagagggagtttgtggcagaattgaatacactaaacaaatatcaaacaccacaatcttgtcaatctccgagggtgttgtgtagaaggagcccacagatacatagtctacgactacatggaaaacaatagccttcgttacactttcttaggttcagagcaaaaaaggatggaattcagctgggaaactcggagggatgtatccataggtgtggccagagggcttgcctttctccatgaggaacatcaaccccatattgtgcatagagatatcaaatccagcaatgttcttcttgatccaaattttacaccaaaagtctcggattttggcttggccaagctactaagagatgaaaagtcccatgtcactacccatgttgcaggcacattgggttatcttgcaccagactatgctagttctggacacttgacacgaaaatcagatgtttatagctttggagtactacttttggaaattgtcagtggccaaagagtggtagatgcttatcaaaacggggaacgtttcatagttganaaggcttgggcagcatatgaggctaatgatcttctgagaatggtggatccagtgctgaataacaactatcccgcggaagaagtgaaacggttcctaatggtggggctgcgttgcgtgcaagaaatggcgaggcttaggccacgaatgtcagaggttttggacatgttgaccaacaatgttgacatgggagagtttagtgtttcaaaaccaggattagtcactgatctcaggagcgccagaataaggagccaaatgaatccatcagaagaatcaagtgttactgcagcaacctttgcagactcctctggatggagtaccgccaatcttgcccgttagatttatagggtgtttgatttcatgattcggaagtgatttttaaaagttaactgttataggttccacgtctcaaacgttattcttctattctcaatatgtttccaaacatgttactattacaagaatggttcttaggttatgatgtaggatcacgccaaatacatcatatcatcaattgggattcatcaaagttttgctcaaagagtttacaatcatcacttttccattactatacagggagggttgccacttcttgtgtcaagtctcccttttcc

SEQ ID NO: 8248 - DNA, 2036 bp, Glycine max
ggtccggaattccccggtcgaccacgcgtccgctttcatcatcctcgacacttttctcaaacaaaagtgactgattaattaacgtctttaaattgtcaaatcctcggcatgcctaccttttgttggatttaccacccacccgtccggatgcattgcatgatgtactagtgaaatgtatgatggatgacatgtagaatgggcacttgtggaaattaacgaaattttgggtccatttttattttattttatttcttttatacgttcatcatcatcatcaaattgggatgttcttctcaggaaggtccaaaaagtcagtgcagcgaaaacggacgatccgaagaatacccttttcatctctctctacaataatcatcatcttcctcttcttcttcagtaaattattgtacctgacgatcttctcggtttgatcttatatcaatggaatttttttagacagaactcggattcacagggaaatctgattgcataggaacaaaaaagacaacacctttttatctctacacaagtgattatggcggttgctgagaatgttggggccaaaatcggttcttccagtcaaaatttggaaaacaatgtagtgtcatcgaactcaggcgaggttgagcaatcaaaacccagaagtgggtccatcaacgacgatcagaagctgaacaacggtgtcttcaaccaccaagatagagttcctggcactatgccagtgcccaatagcaattataactacgaggcccaaatgggtcagatgcacacaaatggggtgaacaatgatgggtatggaatgaatggggtcatttgtggggagaatgggggtgaagagtttcaagcgtgatatgagggatttggaagagcttttgtcaaagttgaatcccatggctgaggaatttgtgcccccatcactaaccaatactcatggctacctacctggacctggtgccggtgctggtgccgggtttggttaccctaataattttatactgctcaataactttggtgatgctaacggtcaaactaacagaaggaggaagaatggctataatcatgggaagcgaagagtgaatcataaaatggatatggagaagagagaagagatgactaggaggactgtttatgtgtctgacattgatcaactggttactgaagagcagttggcggcactctttcttaactgtggccaggttgttgattgccgtgtttgtggggatcctaattctattctccggtttgccttcattgagtttacagacgaagaaggtgcaagggctgctttgaacctgtctggaaccatgcttggatattacccgttgagagtgctaccttcaaaaactgctattgcccctgttaatccaacatttttgcccaggtctgaagatgaaagggagatgtgttcaagaacaatttattgcacaaatattgacaagaagcttactcaagccgatgtcaaacacttctttgaatctatttgtggagaggttcaacggttgaggcttcttggagattaccatcattcaactcgaattgcttttgttgagttcacagtggctgagagtgcaattgcagctctaagctgtagtggggtgattctgggttcactgcccataagggtaagtccatcgaagacaccagttcgatcacgtgctcctcgccctactatgcactgaatcaactttccatgtttctggggttgattgctgctgagatatatttacatatatatatatacatagaaacagctgtgttctaaggaacatgtggcatttagttggtacttttgtcctcatgtcttacagtatggttactttgcttccccttgggggattatggttctctgttttagcttgtagtcggatcgaactttgaggatcttgatgacttaattatgatgcacaatgtgttgtgttgatcatgcaaggagagaagtttatggttggatgtttctaacatctggaattttattttaaagaaacatgttacaaagcccttcgttattcatgatgtgtttatcatggatatttgtttcc

SEQ ID NO: 8249 - DNA, 1198 bp, Glycine max
aggaatacctaatctttgcaatatttggagggacattaatttgttacttgtcatatcactaattaatgtgttgacttcctagtactttttttttttttttttttgcaatagtacctcttaccttccagtttgtgtttgcaagtacataacaaggtttcaaatggttaattaaagggtgggttaaatcagaagatttatagtcatctttgtgccagtggttttttgagtttgggtaaacctaaatacctaatttatttggcagaagcacgtggtttgtatcaatattcatgatttccaacctttgggatactacctctctatcatgattcaacaagaaaaaagaaatgcaacatatatacacaaattgtaggcaacaagagggtgcttgtgtagtagtgaaatggaagctgcttccagagaatctaatccaaccactaagaaggtacgtgatgagaaaaggaaaccaaattgatctcttatggctgcttcacgattacaacagggcactttgcatgtttggcacagtgatcactgacacttccaaggagtgccctcttaaagaatccatagccatgagttcccatgaccaaggtgtcagcctctagtttcttgacagcactgcatattacattcttggcatgtcctacaccaaccactctctccatattgatattagtagcgttcaagtctctgcaaacagcttcagctctttccatgactgaattagccaagtgcatactgtacttttccatagcatcaacaacatcggaggaaaagttataccctgcggcatccaaggagtagaaagcagaaggtggcctgacataaagcagaacaagcttgttggtttcggaaataagattggtgatgcaccaggagagtgcatgcatgctctcttggctctcatccacagccaccatgatctttctctctttcttttccatctctgcaaagtgcaaactcgtcataacttgatatttgagaaattattggctttgaataataatagatagataacggcagaagatagggttggaatatatagaagctagccgcgtcactcctcatgcgcttcttaggatagaatagtacttttttgtttaaaattttaacttaaattgctaaacctgtggattttcctcaatcatcataattcataaaaacaaacaaaaccgggggggggggcctacgtagctga

SEQ ID NO: 8250 - DNA, 827 bp, Glycine max
cggctcgagctcgagccgaatccgctcgagcggctcgaggtgaaggcgtgaccctagccatctttgagaattgttcagttcttgaaggaaagcagagcagagaagagaagagagtttcaagaatggggagcgaggagaagggcgaattctacttgcgatactacgtgggccacaagggcaagttcgggcacgagtttctggagttcgagttcagacccgatggcaaactccgctacgcgaacaactccaactacaaaaacgacaccatcatccgcaagcaggtttacctcaaccctgccgttttgcgcgagtgccgccgtatcattgtcgagagcgaaatcatgaaggaagacgacaacaactggcccgaaccggaccgagttggacggcaggagctggagattgtgatggggaacgagcacatttccttcaccacttccaagattggatctctcgtcgatgttcagagcagtgcagatcccgaagggctacgcatattttactatcttgttcaggatttgaagtgctttgtcttctctctcatttcacttcacttcaagatcaagcctatataatgtgtttgcaatattatgcattcatcctctgagaaatgtgtacttgtttaacaaccatcacttttttttttctaatggagtttgacatctgatagtgacttcataatcatgaatatgatttggttctgtattggtggttacatgaattgcaacttttagatttgagggtatagcccttgtaccaaagtgttgattggattggtttttgtgcatgggttagttattctttcaaaaatttgccttaaccaaaaa

SEQ ID NO: 8251 - DNA, 804 bp, Glycine max
cttatacggcaagaacaaaaatcattcattgattaatcttccatcgctattgtgattatagtagagaatgcaacgaaagagaaaatgagtaggtgtgtatcttgtggtagcgggtctgcgctgattcacaataagaatttgttgatatcaccaattcataatgcattaaaggtgaggggcaacaatagaagttgtggcttgcgtgttcaggtttctatggtggactcttcctccgctgatttcaccagacgcatcgaacgagcttggtcaatttctaagcaaccaaggccaatcgtgtgttcgtcttgcgactcaaaagggcatattgaatgtaaatggtgtgcgggtactggtttttttattcttggtgataacatgctttgtgaagtcccatccagaaacactacctgcattatttgcactggaaagggatcgatgtgctgttctgattgtcaaggaacaggctttcgtgcaaagtggttgggagaacctccttcttcctagtaccaaagctactactcaaatggtagagcatcatggattggaagcggtgaaaaatgtagttatattattatacagtacctcgttttacatgtgtctgacagatgcaaacaacctctagcttgcagattaattttgcattgatcagtattgtcttgttattcagtttttaacattgacaatttggcatgttattagaagcagtatataatcatcaacttatataaatgccattgttttactaaatgaaatatgtaggagttttgaaaccaccaaaaaaaaaaaaaaaatgtttcaacacgt

SEQ ID NO: 8252 - DNA, 1939 bp, Glycine max
tcagctacgtaggccccccccccccctacttcacatcccactgagagcgcaatcgtatcacgctttcttctatcttcaggcaaatcaaattaaaatcacaacacccccaattcccgaaaccctaaccctacctcctcgcagccatggctaagaaacgaaagcttcgatcctctgaccccgaacccaccaaacccatcgagccacagcaacaggaccaagagccagttgaactcgaccaacagcaacaacaacccaaccccaaacaaaccctagaagatcctaacacgatggccgtcgacgaatcaaaacaggaagaagaagaagaagaagaagacgaagaaccccaaaacgccgaaagcgaagaagaggaagaggaagctgaggaacaacaagaggagcggccaccagaaaccctagaagagcaacaggatccagaaaccctggcggctgcaaaccacgccgaagtgaacggcggcaatgaaggaaacaacgaagaagaggaagaggaggatctcactctcgaagaagagcccgtggagaagcttctggaaccgttcacaaaggagcagctccactctctcgtcacgcaggccgtggatatgtttcccgaattcgtcgatagcgtgcgccggcttgctgacgtggaccctgcgcacaggaaaatcttcgtccatggccttggctgggacgccactgccgatactctaaccgccgtgttcgggaaatacggcgagatcgaggattgcaaggccgtcaccgacaaggtctccgggaaatcaaagggttacgcctttatcctcttcaagcacagggacgatgctcgcaaggcgctgaaacaccctcaaaagaagatcggaaaccgcaccacctcgtgccagctggcctccgccggccccgttccggctccaccgccgaacgtgaccccggtgtctgagtacacccagaggaagatttttgtgagcaatgtgaatgctgagattgatcctcagaagctgcttgaattcttcaagcagtttggggaggttgaggatggtcctcttggtttggataagaacactgggaaacctaagggttttgcgctttttgtgtacaagtctgtggagagtgccaagaaggctttggaagagcctcataagaactatgaggggcatactttgtattgtcagaaggctgttgatggtcctaaggggagcaaggggtatcatcatcagcagcattctcatcctcatcaccaccaccaccatcagcctcattaccagaggaaggagaagaacaagtattcctctggtggtggtggaccatcgcatggaagtggtcatttgatggcgccctcgggctctgctgtggggggtttcaaccctggtttgcctgcacaggggttgaatccagcacttggacaggcgttgactgcgttgattaaccagggagctggattggggcttgggaatctgcttggagggcttgggggtgccccagttaaccaggcgggacctcctgctccgtatgcgaatcagcctgctatggggtatgggaaccagccagcaatgcaacccggataccagaatcctcaaatgggacagggcagtggtgtgagacctcatcctggtgctggtgctccttacatgggtcattagataccctcataagatgcatcaatcatttagttttggactctgctgattcttctgaagtaccaggcactattcaaatgcatcttttcatttgtaattttagttactatttgattaattaagaaccagattctgaaacttgtattttttcccttatcttagtagatttcccccctgacatatttttaaaatcttgttatacctcgtattcctttatggaatattgaggaacgggtgaattttggggaagagaaaactttatgataataattttttaagtgtgttgtggaccattatttttccttatg

SEQ ID NO: 8253 - DNA, 2137 bp, Glycine max
ttttcggctgcgagaagacgacagaagcgggagagcgcaatcgtatcgtatcgctctcttatatcttcagacaaaacaaaccaaaaaccaaaccacccccaattcccgaaaccctaaccctacctcctcgcccccatgcccatggctaagaaacgaaagcttcgatcctccaacccagaacccaccaaacccgtcgagccacagcaacagaaccatgagactgttgaactcgaccaacagcaacccatccccgaaccaaccctagaagactccaacaccatggccatcgacgaaccaaaacatgaacaagaagaagaaccgcaaaacgccgaaagcgaacaagaggtagaggaagaggaagaggaagaagatgaacaacaagaggagcaggaaccagaaactcgagaagggcaaccgggaccagaaaccctagaagctgcaaaccaagccgaagcgaacggtagcaatgaaggaaacaacgaagaagaggaagaggaggatctcacactagaagaagagcccgtggagaagcttctggaaccgttcacgaaggagcagctccactctctcgtcacgcaggccgtggatatgttccccgaattcgtcgatagcgtgcgccggattgctgacgtggaccccgcgcaccggaaaatcttcgtccacggcctcggctgggatgccaccgccgaaaccctaacctccgtgttcgggaaatacggcgagatcgaggactgcaaggccgtcaccgacaaggtctccggtaaatcaaagggttacgcctttatcctcttcaagcacagagacgatgctcgaaaggcgctgaaacaccctcagaagaagatcggaaaccgcaccacctcgtgccagctggcctccgctggccccgttccggctccaccgccgagcgtgaccccggtgtctgagtacacccagaggaagatttttgtgagcaatgtgagtgctgagattgatcctcagaagctgcttgaattcttcaagcagtttggagaggttgaggatggtcctcttggtttggataagaacactgggaaacctaagggttttgcgcttttcgtgtataagtctgtggagagtgctaagaaggctttggaagagcccaataagaactatgaggggcatactttgtattgtcagaaggctgttgatggtcctaaggggagcaaggggtatcatcatcaacagcattctcattctcatcatcaccatcaccaccatcagcctcattatcagaggaaggagaagaacaagtattcctccggtggtggtggaccatcacatggaagtggtcatttgatggcgccctcgggctctgctgtggggggtttcaaccctggtgtgccggcccaggggttgaatccggtgcttggacaggcgttgactgcattgattaatcagggagctggattggggcttgggaatcttcttggagggcttggtggtgcccccgttaaccagggggggccgcctgctccatatgcgaatcaacctgctatggggtatgggaaccagccagcaatgcaacccggataccagaatcctcaaatgggacagagcagtggtgtgagacctcatcctggtgctggtgctccttacatgggtcattagataccctcataagatgcatcaatcatttagttttggactccgctgattcttctgaagtaccaggcactattcaaatgcatcttttaatttgtacttttagtctatttgattattaaagaaccagattctgaaacttgtattttttttccttcttatcttagtagattttccccgacatgtttttaaaatcttgttatacctcattcctctatggaggaatattgaggaacgggtgaattttggggcagagaaaactttattataataacttttaagtgtgttgtggccccctgccgcgcttccgtacttccaattctgtttcacttggcttcgcaaaagataactgactcgagtataagttgcttgttttatgtgtgtgtctggcattcagctctggtttatgaggactgctaccattttttttggaagtttaatgttcttatgcaaaaatggtattatacttttgggattctggtgttaactgtctcgtaatctatttttattacttatt

SEQ ID NO: 8254 - DNA, 770 bp, Glycine max
gagaagaggagggtggaggagttaggtgggttcattgatgatggatatctcaatggttatctttcagtaactcgagcccttggggattgggacttgaaatttccacttggtgctgcatcccctcttattgctgagccagatgttcggctggttacattgactgagggtgatgagttcttgatcattgggtgtgatgggatttgggatgtaatgtctagccaagttgcagttagtcttgttcgccgaggattaagaaggcatgatgacccacagcaatgtgccggagagctagtcaaggaagcattgcgcctaaatacatcagataatctcactgtgattgtcgtatgcttgtcgcccattgaaagcattgttgaatcatgtccaccccaaaggcgaagattcaaaacttgcagtctgtctgaagaagcccgtaataggttgaagagcttaattgagggaaattgattgtaaatgcaattcttgtgtttgataaatgttcctttcataaaaaaattaatctgttttttggctgtttcagagagctaaaaagcagccagcagttttgtagtgatagaaaagggatatttggtgagggggtagagggtctttagacctatttaattgggaggtattttctgggttacgtacttacgttggtatatgtagagacaattgttagctaattttgccggattagattcggtccccaccacggccgttccccattttaaaaaaaaaaaaaaaaaaaaaaaaaaaaaaaaaaaaaaaaa

SEQ ID NO: 8255 - DNA, 923 bp, Glycine max
cccaaaaaatgttgtgttgtgtctcttctcttcccaaactctcttcttctattccaaagacccttttgaagtaatcgatggagtttcagtctctttccagattctaccttcttctttccttaaccattctcttccttgcaccctttcacgctcaagctaaaattaaagtcacttactgcgataagaaggcagactatcctgtgaaggtgtctggagttgaaatatcaccagaccctgtggagagtggcaagcctgctacctttaagatctcggctacttctagtaaagctatttatggtggagaagttgtaattggagtttcatacgttggggtgcctgtccatactgaaagaattgatctctgtcatgaagtatcctgtcctgttgccaatggcaattttctgatttctcacacccaaacattgccttcgattactccaccgggaccctactctctgaagatgacactgaagaatgatcgggacgaggtgttaacttgcattaagtttaattttaaaattgtttttggatcttttgtgtctgatatgtaaagtgtcctttgcatgcctgatctgggggaacttttttgctttgttgtgaagtgttttattgtattttgtactggatatcacctttcaattcgagtcgtatcttgtaaggccaatgttctctagtgtcagagtaatgtcaatgacattagactcatgatgttgtataaggtccatgactggaaatttttctttctgtatgatttgcacagtacaatccatagttctaaattgcggtcgtggctgctatgatgcagattgcagcatgaaattattatatgattgcaccgaatgcaaaaaagaattctatagttattataataatcagatatatcttttatataaaaaaaaaaaaaaaaaaccagaaaaagaggg

SEQ ID NO: 8256 - DNA, 1633 bp, Glycine max
tcgagtcagctacgtaggcccccccccgaataatttatttatcctataacttggataaaaaaaagaagcagcgcagcggcattggcaatggagaagctcgcttcttcttctactgcaactgttgttcccactcaacacttcctttttcaatttcaccaacattctcttttcttcttccccaaaactgcgttttccaccttccaccggaaccgcaccgaaccgctctcactgctctgttgcaaaagcagacaccgtcgcctagaagcattatccagcaaacaggatcaactctgggtcagcgaagaagaattggagctagaattggaagaaggagaagattcgtatttggacggtgatgatgacgacgacgactcgtcgtttttgtcgctcagcgacaagcccgacaggaacatggccatgctcgacgattacgagggcgaggagctcgactttgattacggtcccgaccaccgaagcgggtatgtggcgttacttgggaagccaaatgttgggaagagtacactggcgaaccaaatgctagggcaaaagttgtcaatagttacagataaacctcaaacgacgaggcatcggattctgtgtatatgttctggcaccgattatcagatgatactttatgacacacctggtgttctacagaaggaaatgcacttgttagactcaatgatgatgaaaaacgttcgcagtgctgcagttaatgctgactgtgtattggttcttgtcgatgcacgtaaaactcctgaaaaaattgatggactgttggaagaaggcataggagacctcaaagataagcctcccactctactgattctaaacaagaaggaccttgttaaacctggtgaacttgcaaagaaacttgagtggtatgagaaatttactgaagttgatgaggttatacctgttagtgccaaatatggtcagggggttgaagatgtcaaggactggatactgtcaaagcttcccaatggaccagcttattatccaaaggatattgtcagtgagcatccagagagattttttgtagctgaaattgttagagaaaagatttttatgcagtatcgaaatgaaattccatatgcatgtcaggtaaatgttgtaaactataaagctcggccgaatgcaaaagaatacatacaagtagagattttggttgagaaaaacactcagaagattatccttattggaagagaaggaaaggctttgaaactgcttgcaacggctgcccgccttgatgttgaagattttttacagaagaaagtttatcttgagattgaagtgaaggttagagcaaattggcgacaagatgaagggcttcttaatcactatggttatgggggccaaatacgtgttatataatgtgaagatggaaaaaaaaaaaaaaatattatcagacatctagtataatatgacagcatcagggttaacatgactggacgatgctgctgagttggatactacactatgcgcaactgctgctgcagagcatgggtcctttcctagagctctgagttatgctgcttctggattcgatactaaacagacattgtataacaaggaagtagcagagaagcggaaaaatcaaccatctgaatcccccttttctaatccaattgtt

SEQ ID NO: 8257 - DNA, 847 bp, Glycine max
ttcggctcgagtcctgctcgagaactgttttcaagttctggtttagatatgcatgaaggtagcaggttgcagactttagtgatgggtggtgggatggggagtggtggtggcaggatttgtggtggtggaagaggctcacatggtagggatgggacagatgcttattaccagaacatgattcaagcaaaccccaataatgctcttttgcttggaaattatgctaagtttttgaaggaggttcgtggagattatcctaaagcagagcagtatcttgaaagagctattttggctgatcctggcgatgctaatgttttgtccctctacgcggatttaatatggcaaacagagaagaatgctgatcgagctgagggctattttgatcaagctattaaaagtgccccggatgattgctatgtgatggcttcttatgcaagattcctctgggatgttgaagaagatgaagataaggactgtcaacataagactgatcacggccatgcatatccacctgatctttttcaagaaaccaaaggcagccctcatgttactgcagcctttcaatcctacgtatctgagtgaacttggatatatatcttacaagacaaatgaaccataatagtctcaattctcaaacaataatgcttgccagtttttcacctcttggaagtggctactatatagggttgagtaaagtagagatgactatctagctgtaaatagcttatgccataaataagagaaacctgtatgtattatgtttgttgtataccagtggggcttcgaatgctgtatgagaacatgaaattttggtagaaattataaggaatagagaacagccctttttatc

SEQ ID NO: 8258 - DNA, 1121 bp, Glycine max
ccacgcgtccgcccacgcgtccgtgctgcgagaagacgacggacggggatcctgcattatctttttagctcaaatttttgtgaagcatttttattggtagaaatggagagtgagtccgtgaagcgcagaattcacatgattgctgctcactttgcacccaatgatgatatttcaactaccaacgttctgcctatgaactgcagtggcagtctgaactctgtactccggagatgtgataataaggtgtattttgcacgccaagcttctgcttctcttggttattttatgaggcagacttcaattgaagagggtggctcaacttcctttattgctcctaaaacaaatcatggtgctgctgcatctgaatgtccttctgatgcaagggcaccatgttttgctagacctgcaagggaagaatcagtcttcacaaattcggtgatccaaccaatggctcgggagcagggctctgattttagtacacttgatcctcctacatttgctaggccaaccagacagattagaggagatcagttacattctgaaaagaaaacgggctattctgaaattggtggaattgagtggtctccaaggatggatgttgcagaatcagaaggcaaatatgttatcacagtggaagttccaggtgtcagtatcagtgacataagagtggaggttgatgaactaaagttgtgtgttaaaggtagacgctctactagctcttggacagttgcaggttgtccaaatgcttctttttcttcatatcatcggagggaaatactatatggaccatatggggtggtctggccactccctgctggtgtgaacaaggacagaatatcagctgaatttttggatggatttctacaaattatagttcctaaagtttgagtatgactgagcaatattgatttgtagcacatatatgtatacgtatacctataccccgtgcatatagatggagaagaaatgggcattgttctgcatgggccatgtcatgccctacatatatttgtaatgtaatgagcagatgatgggttaattttgatttcatatacaacttaattgttgtgcagaaaatgtcctgatgcattctgaaatctaatttattaagtcaattgccc

SEQ ID NO: 8259 - DNA, 1936 bp, Glycine max
ggccgaaagtgtgggtaaaactaaaaccctttacctcctccaaacaaaaccctaacttgtgattttgaagatgaaggcgaagaagcatgcccacgctgaagaggagggagttgctccgcttccttcaccaacactatccgattccgactctgattacgaggactcttcagccgatgatcaccacgaatcttctgtctcgctggattctcaatcccaatcggaattagaagacgcttcacctgagaatggtagctccggcgttgtagaatctgcagaaaatgaatcatctcaatacgaggacactgttaatgaagaagacggtggaagtgagagctctgatctccatctggaaggagctgagagtgactcctccgaggatgaggtggctcctcgaaacaccgtgggagatgtgccattgaagtggtatgaggatgaacctcatattggatacgacatcaagggaaaaaagattaagaaaaaggaaaagcaagacaagttggattcatttcttgcaagtgttgatgattctaagaattggcggaagatctatgatgagtacaatgatgaggtagtcgagttgacgaaagatgaaatcaaactcgtccgtagactgctcaagaatcgggcaccccattctgactttgatccatatccagatagtgttgactggtttaaatgggaagatgccaaacatccattgtctaatgcacctgaaccaaaaagaaggtttattccttcaaagtgggaagctaaaaaggttgtacagtatgttagagcaatccgtcagggattaatcactttcgacaagccaaaagaggaagatggtccatatcacttgtggggagatgattctggttcaacagaaagagcaaatcatttggcttacattcctgccccaaagcagaaattacctggccatgatgagtcatataatcctcctctagagtacattccaacccaagaagagatcaattcttatcaattgatgtttgaggaagaccgccccaagtttattccaaaaaggtttgcatctatgaggagcattcctgcatatgagaatgctatgaaagactgctttgaacggtgtttggatttgtacttgtgccctcgagttcggaaaaaacgcctcaatattgatcctgaatctttaaagccaaagcttccaagtcgaaaagagcttaagccttatcccacaacttgctatatcgagtataaaggccatgaagatgctgttacatcaatttcactcgaagcttcaggacaatggatggcttcaggttcacgtgatggaactgtccgtatctgggaggttgaaactggcagatgtcttaggcggtgggaggttggtgaatctgttagctgtgttgcttggaatcctctgcctgatattcatcttttggccgtttctgtgggccaagatgtacttctacttaacacttgtttgggggatgaagaagagcagaaacggattaaggagcttctctgggttgactcgtctacagcatcagatgactctggcaacaaagcacctagtgtaagctggcttaaagatgataaacatatgggtttaaggttaaggcactttaagactgttactgctgtagaatggcaccggaaaggtgactacttttcgacagtgatgccagcaggtgaatcaagagcagttctgatacaccagttatccaaaaagcttacgcaaagacttccattcaaattacatggacttgctgttaggtcaaccttccatccatcccgttccatcttctttgtttgtaccaaaaagagtgttcgtgtgtatgatttactgaagaccaagatctctgataccgccggccactgggcttcgtgaagcttcatccattgcagttcattcctggaagtgataatttaatttgtgggtagccaagaaaggaagatgtgttggtttgacattgac

SEQ ID NO: 8260 - DNA, 1417 bp, Glycine max
aaacccctcctttcttgtgcataaatatgacagtgcacactcactctgaatcccctcttcttccataaaccctacttctacttccctttgttctcaaaccttatcccttatcctcccaaaaccaaaccatgtctacctccgcagcttctctcgcactcccaaccctcactctccgaactcgacaacctctctgttctccccaatgcttctcctcgtccctctccctcacccctaactccaaacccatttccatttccgccgttttcctcaaaacaacgctgtcgtcgtcgtcgccgttgtcgctgtcgtctcgcttcgttccccatgtctctgtgttggagcaggaggaggacaccttcggcgacggagacggccccagcttctcccgcgaccttaagctctttgtcgggaatctccccttcagtgtcgacagtgcgcggctcgcggagctcttcgagagtgcggggaatgtggaggtggttgaggttatttatgataagactactgggaggagcagggggtttgggtttgtgaccatgtcttccgttgaggaagctgaagcggctgctaagcagttcaatggctatgaacttgatggaagatcattgagagtgaattctggaccacctcctgctcggaatgagagtgctcctcggtttagaggtggttcttctttcggttccagaggtggtggtccttcagatagtgaaaaccgtgttcatgtaggtaatcttgcttggggtgttgacgatgtagcacttgagtctttgttccgtgaacaagggaagaaggtcttggaagctagggtaatctatgacagggaaagtggacgatctagaggctttggattcgtgactttcggtagccctgatgaggtcaaaagtgcaattcagtccttagatggtgtggacttgaatggcagagctatacgagtctcattagcagattccaagcccaagcggttctgaagcttttcatctatacccgagagaggatttcggtagttgggacttgggagttatacagctgcaagatgtcattggcaatcagtttggacaagaaatacacttacatgcattgagactagatgtacacacagtttcaatatctgacagaggagaatatatcagtgtctcttgaagtttaaatgtatgttccaaatttgattgttgtcatttgtaactgatttgtagtccgtattttcactatagaagtagatgtctcaaatatttattggttaccccgttccaacattgttgtggaagaattttataattgcaatgtgcctggaaaattatctaccacagatttatcttttggttcaattgtatgaaaaaaaagtttatgtggaggccttaaggtaaatacaaccaagaatttggttatcggtgaggtatcgtcacataaaaaaaaaaaa

SEQ ID NO: 8261 - DNA, 1472 bp, Glycine max
aacccttgctttgtttgtgcataaatatcacagtgcacacccactctaaaatcctctccttttttcataaaccctacttctacttcccccctttgctctcaaaccttatcacctaatccttatcctcccaaaccagaaaaccatgtctacctccgcagcttccctcgcactcccaaccctcactctccgaacccgacaacctctatgttctccccaatgcttctcctcgtccctctccctcacacccaacaacaaacccatttccatttctgctgtttttctcaaaccaacaactctgtcgtcgtctcgcttcgttccccacgtcgtggtgtcgtcggatttggggcaggaggaggacaccttcagtgacggagacggccccagcttctcccccgaccttaagctctttgtcgggaatcttccgttcaacgtcgacagcgcgcagctcgcggagctctttgagagtgccgggaatgtggaggtggttgaggtgatttatgataagactactgggaggagcagggggtttgggtttgtcaccatgtcttcggttgaggaagctgaagcggctgctcagcagttcaatggctatgaacttgatggaagagcattgagagtgaattctgggccacctcctgctcggaatgagagtgctcctcgttttagaggtggttcttctttcggttccagaggtggtggtccttcagatagtgaaaaccgtgttcatgtaagtaatcttgcttggggtgttgacaatgtagcacttaagtcattgtttcgtgaacaagggaatgtcttggaagctagggtaatctatgacagggaaagtggacgatcaagaggctttggatttgtgactttcagtagccctgatgaggtcaacagtgcaattcagtccttaaatggcgtggacttgaatggcagagctatacgagtctcattagcagattccaagcccaagcagttctgaggatttagcttttcgtctatacccgagagaggatttcggtatttgggacttgggagttatacagctgcaagatgtcattggcaaaaacagtttgggaaagaaatacacttacatgcattgagactacatgtacacagtttcaatatctgacaggcttcttcctagatgagtgtctgttgaaagtttaaatgtatgttccaaatttgatggttgtcatttgaaactgatttgtagtccgtattttcactatagaagtagatgtctcaaatttattggttaccccgttccaatattgttgtggaagaattttataatcgtgatgtgcctggaaaattatctaccacggatttatctgttgattcaattgcttgctggggagagcttctgttgaggacttgaggtaaatgaccaagaatttggttctcgttgtggtatcgtcacaatttggttagggatttcctattcaagacatatcatgagagatctgaactgtataatcaaa

SEQ ID NO: 8262 - DNA, 969 bp, Glycine max
ttttttttttttttttgcaggaaagaaaggatccatttcaaaacctcactgaattttcaacacaacgggtgatgaatggactgataattaagatagccttatccatgaatttccaataggaagctgccacgtcagatacaggcaaatatgctgaaaatttccaccaccatttctctcaaaacacacgttaacatatccaacattccaacccatttcatcactcttcacagaaacatcgagcagcagaagaaagaaactacagaaaaaagaaaaaagacatggcttccacttctgcagtttcattggctatgccagtaacttatgccagccagaagagggtactggtgcctagctctgatgcattattcctcaagccactgcctctacgttcttattcttccaaggcaatggcagcatcaaaagtacccaatggaaggtttcaggtgagggcttccatgaaggagaaagttgtgacaggcctcacagcagctgcattcacagcctcaatgatggctcctgatgtggccgaggccgccgtttcgccttctctcaagaacttcttgctcagcatcgccgccggtggtgttgttgttgctgccattatcggtgcggtggtcggggtttccaatttcgatcccgtcaagcgaagctgatcgatatatcaagttctcaggcactactgtgttttttcttttttttttttgttacctcttgtcataatatttgtaatgttcttcagaaatgaagtgaaccctctctcttgtgtgtactaatatgctactcttatgctacacttggagcagaagcttttcagttcttaaatatgtaattttcgtttcgacacatcatagaaatagttaaattacgtgtttatgctgctgcatgggaacacaattatgtagcagaccaatgatagattacattttgaaataatccaattctagggaacgttctacaatattaaatata

SEQ ID NO: 8263 - DNA, 1801 bp, Glycine max
tacggctgcgagaagacgacagaaggggaccataaaatccgcctcgtacgcttggatcatatatttcaacctcctcagatttctttcttagcaaaccaattttcaaccacatgggtatccctcactttctcgttataccatatccagttctgggtcatgtgaatccccttatgcaattgtctgaggctctaaccaagcatggctgcaaaatcacatttctgaacacagagttcagccacaaaagagcaaacaacgctggtgctggactagacaaccttaaggaatcaggaatcaagtttgtgacactcccagatggcttggaacctgaagatgatagaagtgaccatgagaaagttattttgtctatccaaagcaacatgccttctttgcttccaaagctcatagaagatatcaatgctttggatgctgagaatagcataacttgcatagttgctactatgaatatgggttgggccttggaaattggacacaaacttggaattgaaggagctcttctttggactgcatctgcaacttccttggctgcatgctattgcattccaaggctgattgatgatggaattatagactcagaaggagtagcaaccaagaaacaagaattccagctttccctaaatatgcctatgatggaccctgcagaccttccatggggtggcctactcgagccgttcttccctcaaatagttaaagagatgaaaatcttggagttaggagaatggtggctttgcaacaccacttgtgatcttgagcctggagcacttgccatatctccaaggttcctcccaattggcccattgatggaaagtgacaccaacaaaaattcattctgggaagaggacataacttgcctagattggttggatcagcagccacctcaatctgttgtgtatgtttcttttggtagtttagcaatagttgaacctaaccaattcaaagaactagctctaggacttgatctccttaacatgccttttctttgggttgtacgttccgacaataataacaaggtaaatagtgcataccctgatgaattccatggaagtaaaggtaaaattgtcaattgggtgcctcagaggaagatattgaaccaccctgccatagcttgcttcattagtcactgtggttggaattcaactatagaaggtgtatgcagtggcatacctttcttgtgttggccatttttctctgaccaatttgttaataggtcgtatatttgtgacgtgtggaaggttggattgaaattagacaaggatggaaatggattaatactgaagggagagataaggaagaaggtggatcaattgcttgggaatgaagacatcaaagctagatcgttgaaactgaaggaattgactgtgaataactcagttaatggtgatcaatcttcaaagaatctagaaaagtttattaactgggcaaagtagtactacctcctgctatagtttggattggaagttgtctctctttaatttttctcaatttttatgtctgaaattcgtttactatagctaaacagcagattgcatctccctgttgggtccaaagatactcaaaagaatcttttccaatttcaaaagaatagaagttaagtccaatgacaaatttagtttctgctttgctttgcctattttatttccaagttggttggttgtagtcatatagcatagctaccagcttaaggggtggagatatgctgttgaattatgtggatttgttacttaaattgataactatttttttttggacagcaaaagatatctaattaatattattagtgctc

SEQ ID NO: 8264 - DNA, 1351 bp, Glycine max
agaagacgacagaagggtacggctgccccgagcgggcagctgggtgagaggagtgttcccaaaatcgcaatatcttcaactctatctgcaacagccaactttctcgttcgtcgatcacaaaaatggcggcgaaacttcaaatatttacgggattgccccccgcgccatttcaatcttcctcctccactctctgcgtactcaagaagcctctcactacctccttcttcggcactgcacgagtggaagttctgaaacttcgagtgatgaggattgcgaagcctgcgcgcggtggaggtgctctcggtgctcgcatgaacctctttgacaggttcgccagagttgtgaagtcgtacgcaaacgctgtcttaagctcgtttgaagatccggagaaaatattggagcaagctgtgcttgaaatgaacgacgacttgaccaaaatgcgtcaagctactgcacaagtgttggcatctcaaaagcggttggaaaataaatacaaggctgcacaacaagcttctgaagagtggtaccggaaagcacaacttgctcttcagaaaggtgaagaggatcttgctcgtgaagcacttaagaggcgtaaatcttatgcggataatgccagttctttgaaagctcaacttgatcaacaaaagactgttgttgagaatcttgtctctaatacaaggcttttggagagtaagatacaagaggcaaggtcgaaaaaggatactctcaaagcaagagctcaatcagcaaagactgcaaccaaggtgagtgagatgctgggaaatgtcaatacaagtagtgctctttcagcttttgaaaagatggaagagaaagtgttggcaatggagtcccaagctgaagctcttggccagttgacaagtgatgatcttgaaggaaagtttgctttgcttgagggctcatcagttgatgacgaccttgcaaatttgaaaaaagagttatctggtgcctcaaagaaaggagaccttcctcctggaagaagtaccactagcgccaacactggaattccatttcgagatgctgagattgagttggaacttgatcaattgaggcaaagagctaaggaattttgaatcatggaatcttttttgtttcttcatatttaagcttgaatttagtttcttttatttctgatataaacgttgtacagctcaaggccaatcacgatattgttcgactactggccaaaaattgattagaaaaatgaactgattagctgcatgctcatgttatatttaaatacctcaagtgtgatgatattgtaatatataatttgtacgatcaacagtcttttctattcctattaaatttaaatgcatgatttgcacaaaaa

SEQ ID NO: 8265 - DNA, 1697 bp, Glycine max
gcgagacgagacgccagtgtgttttttttcctccctaccctttcgaagacctcagcttgaccaccctctatttatctctccaatggccaccgccgaaccactccagaacggctccgccgaaaacccacttccggtggacaatgcccccgccgcgcaaccgcccaccgaaacggaagctgacgccgccgccacggcatctactccgccggagaagaggtggccggggtggcctggggactgcgtgtttcggctcatcgtgccggtgggaaaagtgggaagcatcattggacgcaagggagagctgataaagaagatgtgcgaagaaactcgatcccgcattcgcgttctcgacgctcctctcggcactcccgatcgaattgtacttgtgtccgggaaggaagatccagaggcagctctttccccggcaatggatgctgtagtaaggatattcaaacgtgtctctggattctctgaaactgatgctgagaatcaagaatctgccgctggtcttgcattttcttccatccgtttattggtggcatcgactcaggctatcaatttaattggaaagcaaggctctttaatcaaatctattcaggagaataccagtgcttcagttagagtgttgtcaggagatgaggtgcaattttatgctactgcgaatgagaggattgtggaaatccggggagaagccttgaaggtccttaaagctctggaagcagtagttggccatctgaggaaatttttggttgatcatagcgttcttcccctatttgagaaaacttacaatgcccctacctcacaagaccgtcaagcagagacctggtctgacaagtcattggtgcatacttcttcacgtactagcatatttgccgatattcctctttcaacaaaaagggattctgtcttagctgaccgtgaaagtcaacccgcccggccgctcccttcctccactatgtctctctatggtcaggattcttcactttctggcgtccattcttcagctcttggccgtgttggtgctcctattgttactacggtaatacaaacaatgcaaatacctctatcctatgcggaagacatcattggtattcaagggactaatattgaatacattcgccgcactagtggagccatattgactgtgcaggagagccgggttcctgatgaaatcgttgtagaaataaaaggcacctcatctgaggttcaaacagctcaacaattgattcaggatgttataagcagtcacaaagaacctgtcactagcagttatggcaggctagatgcagttccaaggtcttcatactctcatttgggcactacatcacgcctccctccatcttcgttgtcctcacaaccatacacaggttatggagcttctggtttaggagactacagtactttcaggctttaaattggttttccctatattcaagggtactccatttagactagtttctttctaattgggtctgattggagagattaacgcttgagtatatcatgaggcctcagagaagcttgctttcatgtatttgatatcatcttgtattgtgggtaattttataggtggcctgtagctgagaaattttatagaaaatgtaatgaaatattagtcattttgatgatgtttatttttcaagtgcgcatatgaagcaggttgcaaataccaaatatctcggttttttttccctaac

SEQ ID NO: 8266 - DNA, 1657 bp, Glycine max
  misc_feature (18)..(18): n is a, c, g, or t
  misc_feature (26)..(26): n is a, c, g, or t
tcgagtcagctacgtagncccccccngataaatgaaattactgataggatatacagggacttcagctcgtctcagctacggtggccccccccccagtatgaagaaaatcgactcaaggctgctcaaagtatagcagaggagaggctgaacctgagtagccaactctcaaaattaaaatatcagttggagtatgagcaaaatcgggatatgaattcacgaattcaagatttggaatcttctcttggtgctttagagaaagatttaaaacgtgtacatgacagagaggctgcagcgaagttagcagctgagaatgctacggaagagattaatcaacttaaggaagaagctaaagagtggaaatcaaagtcagaagattgtgaaaaggaaatccaagagtggaagaagaaagcttctgcagccacaacaaacatatccaaacttaatcgtctgatacactctaaggaggcacagattgatcagttgaatgtgcaaaagcaggaaatattagaaaaatgtgaactagaacagattagcctcccgatcatactggatcctatggatactgatagctcagtaccaggtccatcttttgactttgatcaactaaatagggcactgaaagataggagacactcagacagggataaaattgaggtagagtttaagcaaaaaattgatgccttgatatctgagattgaaagaacagcaccaaatttgaaggcattggaccaatatgaagctctgctagaaaaagaaagagctgtaactgaagagtttgaagctgtcaggaaagaggagagggaaaaaacacagagattcaatgaggttaagcagagaaggtaccacttgttcatggatgcttttacccatatatctggtaatatagataaaatttacaaacaacttacaaagagcaacacacatccactgggtggaacagcatacctaaacttggaaaatgacgatgatccatttctacatggcatcaaatacactgctatgcccccaacaaagcgcttccgtgatatggagcagctatctggtggggaaaagacagttgctgcacttgcattgctattctccatccatagttacaagccttccccgttttttatattggacgaagttgatgctgcgttggacaacttgaatgttgccaaggttgctggctttattcgttcaaaatcttgtgaaggagcaaggattagtcaggatgttgatggtggaaatggtttccagagtattgtgatatcactgaaagacaccttttatgacaaagccgaagcattagttggggtttacagagactctgaaagaggctgttcgagaactctcacctttgatttgactaaataccgagagttctaaaatttcatccacagggtacagttgataagccacctgctatgtacagagcattcagagcttggttgcatttttatttcttgtttggaggtggccaaacttatgtgtgtatctcttcttttctcccctcttcaatttcatgttttttaataccagtctggttcttttttaaaattattgtaaatgggatttcctcacattctatgtatgtagaatacagtagctagatgtccaaactttcgttcttgaattaaaaaaaaaaaatcgaaattttttctcaaaaaaaaaaaaa

SEQ ID NO: 8267 - DNA, 1278 bp, Glycine max
  misc_feature (40)..(45): n is a, c, g, or t
  misc_feature (192)..(196): n is a, c, g, or t
agcatagtaaattgaggtatcagatattttgtgctgccgnnnnnnacccagaaaatagtcagaaagctgaactcaagtctccaaaagaagaagatacttttgcatggttaattttacccttgtaagaaatatataaggatctagaaaagttttgatttcataaagggcaaccaggaacctaatatccaatgnnnnnccataaaagccctatcttccggccatgtcatcacacactatctagaatgaaaagaaatgagtggttcagcaattgaagctgtggcagattatgaaacagcattgacattgataagccaagaaaaattagaaacacacagggaaaataaatatctgaacaacataatctatattctttccctgggggcctcagaatccttaacagaacaagttgcagggatggcctccactctctctatatcctcttcatccacccttgttgatgccaagcctccaactccaagacaatgcgtcacccttcccactcttccccctccaccttttcactctcagactcgtccttggaagaccactgctttctgtcgtaggcttgctcgcaattttatggcaatggccaccacaagagaggcagccgcagcagaagttgccgccacaactgacctctctattgccgagacgccagagattgtgaagactattcaagaagcttgggacaaagttgaagataaatatgcagtgagttcactggcagttgctggtgtggttgcattggtgggctcagctgggatgatctcagcaattgataggcttcctttaattcctgggcttcttgaggtcgtaggcattggctacactgggtggtttgcttacaagaacttcgttttcaagccagacagggaagcttttctacgaaaggtaaaggaaacatatagcgaaatacttggaagcagctaaaagagtgaggaattgatgcttagattctgttcacacaaaagagatctgtctttcagtattttattgaagatgcaaccttgtcgcaataagcttcctgaccatactttatcgcatgtgatgtaatctagcctgaaaataaatgtaactcttgtaataatcattctacttcaagtagatatcatttcttcaattatccctttgtggtttcaaagttaagaaaaaacatctaatgctagcatggatgacttcatgaatttgaaggaaaccttatcattgtatatattgatctatttgattttctttgggagctaaaaaggatctcactaaaatataaaaaaaaaaaaaaaa

SEQ ID NO: 8268 - DNA, 902 bp, Glycine max
acgaggttcagcacatggaaaaattacaaaacataaatcaatatcttttccctgggggcctcagaatccttaacacgagtgaaagtacaagttgcagggatggcctcaacctcctcctccacactctctatatcctcttcatccacccttgttgatgccaaggctccaagtccaagacaatccccacaatgtgtctcccctccacctgttcactctccttggaagaccactgctttctgtcgcaggattgcaagcaatgttatggcaatggctaccaccagagaggcacccgcagcagaagttgccacgaccgagctctctgttgccgagacgccagagattgtgaagactattcaagaagcttgggacaaagttgaagacaaatatgcagtgagttcacttgccgtagccggtgtggttgcattggttggctcagctggcatgatctcagcaattgataggcttcctttaattcctggggttcttgaggtcgtaggcattggctacagtgggtggtttgcttacaagaacctatttttcaagcctgacagggaagcttttctacgaaaggtaaaggaaacatatagcgaaatacttggaagcagctaaaacagtgaggaattgctgcttagattctgttcacacaaaagagatctctgtcttgcagcattttgttaaagatgcaaacctcgcttcattttgtcgcaataagcttcctgaccatactttatcccatgtgatgtaatctagcctgataataaatgtaactcttttaataatcaatctacttcaagaagatttcatttcttcaaaaaaaaaaaaaaaaaaacaaagttaccaaaaaacatctaatgcatggatgacttcatgaatttgaaggaaaccttatcattgtaaaaaaa

SEQ ID NO: 8269 - DNA, 1764 bp, Glycine max
acggaagaaaagcacttgaggatcacataacagaaagtcctgcaagggagctttgcattttgaccactctagctcagagtgatcctccattacttgaagatgctttaaagagaataaaagttattcgtgaaaaggaattgtctcatgctgatgaccaggggagaatgtcttacccttctgctgaagaagctttgaagcatcttttgtggttagctgactctgatgctgtatatgaagctgctttgggtctttatgatttaaatcttgcagctattgtggcattgaatgctcagaaagatccaaaagagtttcttcctttcttacaggaattggagcgtatgccaactctattaatgcaatataatattgaccttaggctgaaaaggtttgaaaaggctctcagacacattgcttctgctggagattcttattatgatgattgtatgacactcgttaaaaaaaaccctctactttttcctttggctcttcaactttttactggccctaccaagcagaagccattccttgaggcatggggggattatcttagtgatgaaaaatgctttgaagatgctgcggcaatttatatgtcctgtttcaatctggataaggctctgaagtcttatcgtgctattaataactggagtggggtgcttacggttgctgggttccttaatttgggaaaggatgagctactacatcttgccagtgagctctgtgaagaacttcaagcactaggtaaacctggggaggctgccaaaattgccctggagtactgtggagatgttaacaccggtgtgaatttgttgattactgcaagggactgggaggaggctttgagggttgtttttatgcatagaagagaggacttaattaaaacagtgaagagtgcatctttggaatgtgcaagcacacttaccagtgaatatgaggaaggcttagagaaagtggggaaatacttggcacgttacctggctgttcgacagagaagattacttcttgcagcaaagctccagtcagaggaacgtgcagcaagtgatcttgatgatgatgctgcttcagaaactagcagtaattttagtggaatgagtgcatacaccacagggaccaagaaaagttctgctgcttcaatgagctcaactgcgactagcaaggcaagagaaactaggcgtctgaagaagagaggaaaaatccgtcctgggagtcctgatgaggagattgccttggtggagcatttgaaaggcatgtccctgacagtggaagctaaacgtgagctgaaatctttgttggtctcccttatgatgtttggtgagggagaaacatgtaagaagctacaacaaacgggggaaaactttcaattgtctcagatggcagcagtcaaattagctgaagatacaatatctaatgataccataaatgagtatgcacatacgttggagcaatatacccaaaaagtaaggaatgaaattcacaattcagaggctttctcgtggcggcttaaagtttttttgtcctatgagtgagcgtagcaaattaacataaatttttgttagatgtatctgcatgcagtttgatgttattagcatcgtttcttttgagcttgtcccataactatgattgtataatcactctgaattgattgtgttgccctgaacatctatattaacaatgaaagccgattagtgctcgatgagagtggattgatcagactatataaatcaaaaaaaaaaaacacggaagcaaaaaaaaaaaaaaaaaaaaaaa

SEQ ID NO: 8270 - DNA, 1631 bp, Glycine max
gtggtttacctagtattctcagtttgtgaattgaaatgatgtcatcaactatgttctaaattcaccaacccaacgtcttgtaagctccgcccctggacaaaatcaaggtcccatttatgcaagctttgattcacattcctgttcgtttttccttcgcaccttttcttcttcttcgctccgtgccatgtcttcctctctcgctcttccttccactcccttcttcgccaatggaacaagaatcttcgctctcaagcactctctccctcgctctagggtttccatgagcgtctccgctggatctcaggcttccgttcaccaggctttgttcgccgattacaaggcctccacttcattcctcttcccgggccagggtgctcaagctgttggaatggggaaagaagctcaaaatgtgcctgctgctgcggttttgttcaacaaggcaaatgacattttggggtttgatcttcttgatatatgcatcaatgggccaaaagaaaagttagattccaccgttattagccagcctgctatttatgtcacaagtcttgctgctatagagctacttcgtgcacgtgaaggaggtcagcagattattgactcagttgatgttacatgtggtttaagcctgggagaatatactgctctggcatttgctggggctttcagctttgaagatggactcaagttggtcaaactgaggggagaggccatgcaggatgccgctgatgctgctagaagtgctatggttagtgtgataggactggactcagagaaggtccaacaattgtgtgatgcagccaatcaggaagttcctgaagctgagaaggttcagattgccaattacctgtgcccaggaaactatgctgtctctgggggattaaaaggagttgaagtgctagaatccaaggcaaagtctttcaaggctcgaatgacggtgcgcctagctgttgctggtgctttccacactagttttatggaaccagctgtgtcaagattggaagcagcattggcaacaacagaaatcagaaccccaagaataccagtcatctccaatgtgaatgcacagccacatacagatcctaacacaataaagaagatattggcacgccaggttacttcacctgttcaatgggaaacaacagtgaagactcttctaaccaagggtctgaagaaaagctatgaactgggacccggaaaggttattgctggaatcgtcaaaagaatggacaaaggtgctgatattgaaaatatcggtgcttaatgtggggaccttgctccttcttcgggttggaatgaacaaaactaaattgtgttagctataaatcaggatgcgtggaacttgaagctttgaaagcaaggagcagctacagtcatatttgaatgccagttttgaagttaaaatgttaaattataattcacgagttagataagtgattgtacttggcactagaattttttagtttttctaatcttatattcaatctgtctcggagttaattatgcctatgcttctttgtaccaaatatagcttttggcctttacacaggcttaataataattagaagaaacaacactttccattcaaaaaaaaaaaaaaaaaaaatttgtaaggctctagatgatccaagctt

SEQ ID NO: 8271 - DNA, 898 bp, Glycine max
  misc_feature (733)..(734): n is a, c, g, or t
  misc_feature (745)..(747): n is a, c, g, or t
  misc_feature (806)..(806): n is a, c, g, or t
tttttttggtttctctttaacaaggcacgaaaatgaccatttaaaaaaataaaggaattttcacaagtgaatacaccatcagcaccagagcaaagctttggtaacccattggagaatcgagcactttcaagtttcaatttcaactacatttcgcagcactagtatgcctcagctagtaagcagtaactacaccaatagagccaaaattccttccaacacaaccaagttattgaaaactatgtatttaacaatgccatattcatagtgagttgatacaatgacactcacttcttctctgttgacttgatgacagtaactcctttggttgcatcaacaagtcccttcaaagaatctctcctaggccgggcaaccttgttgttaggatcaaatagtaggacttcttcaaatgcctttagagcagacttgtagtcctttttactctcaaaggcatcaccgagattgttccaagctgtgacatagcctggttgaagcttgacagctgtctcaaattgagcaattcctttgtcaactttcccatcgcggacatagctcacaccaagagcgttgtaaacctgggcaagatccggattatccccatcccatttctcaattgcttgaagcaagaacttggtagcagcagggtaaaatttcctgcgcagcatcactgcaccaagttcaaaaagctcagttgcaccaccatcaccacttcttacttgctcctgcatactctctnncatttaggtcnnnttgctgagctgcgtgacatatgaaacatcaggagaaatcactgatatagtttgtccacnagaggaatgctgaaacccatttggatgatctttccccatctacaatatctttggttgtaaagtcactcaacatagattgtttgttgaaaagg

SEQ ID NO: 8272 - DNA, 1757 bp, Glycine max
cttgaacttgccgcttcttcaagtcgaagacaacccgcccacgcctccgcctgaaacgacagcattttttgatctattatggtgaaggggttgcacgggcagaacctccccgcccacgtggcacagctggttgatcagctggagcgccactgcttcgctcccgatggatctctcatctccaagcctctcttcaacgatctccaactcgccagagaggaaatgtgcagggaaagactgcgttacctggaagccatggctatatattctgaggctattgcaatggtggaggagtatcagcaagccatttctgtgtctaaccttggtggaatcagagatactggcaatctttatccacagcttgggttgaagaactctcctcaggtttatcagactttagagcatcaaatggttgttgctgaagcagctcaacgattgagactacctcttatctccaaagatggggaggttcatgatgaagacattgaaaagctaagtgtagtgtctcgaagctctcttgacagtactgttagtggggctaattcttctaactataacacaccaagcagctctgttagtggggctaatactgcccttgctgcttcggatccagtggaagtcggagttggtggtgttgccaatcgttttttgggaattacaccttcttatttgtggcaaactcagcatcaaaaagcaccattatccgtggatatgactgaatatcgcctgtctgtttcacgggaggtagaggctcgcttgaagatgaaatgtgaaaaattatcagatgcctttgtattggatgacaatgattcttcatcatctggaagtcatagttcaagttctcggcttccagaaagggtgaaactgttgattgaggagattgaaagagaagaaacagcgctgcgggatgacctttattctgcagatagaaagtttgctgaatattataatgtcttggagcagatacttgcagtgcttattaaacttgtcaaagatttgaagttggagcatcaacataaatatgatgagatgcagaagacttggctctgtaaaaggtgtgagaccatgagtgcgaaattgaggttctatcataattgtgatattttccattacatgtcagtgttctagagcccgttctcttgctcgaaacttacactaaggactctacacctgcccttcataagataaggaaatatcttgttgaggccccagaagaagcttctattgcatataacaaagcggttacccgcctgcgggagtatcagggtgttgatcctctctttgacaacattgcaaggcagtaccatgatattgtgcagaaattggagaacatgcaatggacaatccaccaagttgaaatggatctgaaacgtttgccagataaacccagcacatagaagttttatgctttgtctccttgttcttggtttgaattctttttgtaaatggtattaaaggcatcaccctcaattaacctaacattcaatctgtgagcttttttttaaaaaataaaaaatatttggattattttgcattcccttccctgatagaggagaaaaaggaacctccaaaacctgctatttctgctagtttaagatgtcaaatagtattgaggtctttattcttttgtatttaatcaaagtatttttgtgtgcgtaggttctaatactcagcttctgaatgacacaaatatgggtggatgcaatgtataagtaaacatgccctaagggaattaaaaaatcgtgcttgcttcagttttt

SEQ ID NO: 8273 - DNA, 1247 bp, Glycine max
  misc_feature (1236)..(1247): n is a, c, g, or t
tgacggtggattttgtgttttttgacagttaaagcccacgcgtccccccccccgtcgcgcgcaacgatatctgcagattagagtgtgaagtccaaactctgaaaccctcaactcaaatccaatcctttggttggtttcgaattcgactccaaccaaattcccaacacatggactcggttctcttgcacttgcatctccacactctccctcctctctcctccgccactcaccgccctctctgccaccctctcgccgcctcctccgcttctttccaccgctcttctcctcctctcccacgcttccgcttctcgccgcttctcgccgctaacaccctcaccgctaataacatctcgccaagaagtggactatacactgttggtgactttatgacaaagaaagaggatttacatgtggtgaaaccgacaacatctgtggatgaagctttagaaattcttgttgaaaacaggataactggttttcccgtgattgatgataactggaaactggttggtgttgtttcagattatgatttgttagcactggactctatatcaggtcacgggttaaaggataacatgtttccagaagttgacagtacttggaaaactttcaatgaggttcaaaagctgctaagtaagaccaacggaaagttgattggtgaattgatgaccactgcccctatggtcgttcgtgagaccaccaatctcgaggatgctgcgaggttgttgctagagaccaaatttcgacgccttccagttgtagatgctgagggtagactggttgggattatcacaagaggaaatgttgtaagagccgcactccacatgaaacaagcgaaccaaaagaaagcatgataggattcagaagatcattaaaaaacttgttgctggatttcatgcagtagttcgattcaagtgttcacagaatttgttccccaaaaaaaaagtgtccacagaatcttgcttaaatcagaattaaaattttagcttaggcatgtatatcttatcgttttggcatttacacgaatgtttgtcacgggcaatattttgatagggctattattattcttcttaatatgttcttgttgtaatttatatgggcaaccttggtgataatgatgttgaaaatgttgtgaattcgcagcattaatcatatgtcaaagactatagataattcagacacaaatttcaaccggcattaatctacttccatactaaaaaaaaaaaaaaaaaaaannnnnnnnnnnn

SEQ ID NO: 8274 - DNA, 1242 bp, Glycine max
tcccgcgcgtggccctcggaaaagaaattgacggtgaattttgtgttatttgacagttaaaggaagaaatgggtgtctctgcagattagacattagagtgtgaactccaaactctgaaaccctcaactcaaatccaatcctttggtgggtttcgaattggagtccaaccaaattctaaacacatggactcagctctgtcgcggttgcatctccacaatctccctcctctttcctccgccgctcaccgccctctcttgcagcctctcgccgccgccgcttctttctaccgctcttctcctcctctcccacgcctccgtctctcgccgcttctcgctgctaacaccctcaccgctaatgacgtctcgccaagaagtggactatacactgtcggtgactttatgacaaagaaagaggatttacatgtggtgaaacccacaacatctgtggatgaagctttggagattcttgttgaaaacaggataactggttttcccgtgattgatgataactggaaactggttggtgttgtttcagattatgatttgttagcactggactctatatcaggtcacgggctaaaggataacaacatgtttccagaagttgacagtacttggaaaactttcaatgaggttcaaaagctgctaagtaagaccaacggaaagttgattggtgaattgatgaccactgcccctatggtcgttcgtgagaccaccaatctcgaggatgctgcgaggttgttgctagaaaccaaatttcgacgcctaccagttgtagatgctgagggtagactggttgggattatcacaagaggaaatgttgtaagagccgcactgcacatgaaacaagcgaaccaaaagaaagaatgataggattcagaagatcattaaaaaatttgttgctggatttccgtgcagtagttcgattcaagtgttcacagaatttgtccaaaaaaagaaaaaagtgttcacagaaacttgcttgaattagaattaaaattttagcttaggcatgtatatcttattgttttggaatttacacgaatgtttgtcacgggcaatattttgcaagggcaattattatcattcttaatgatctcgttgtagtttatatgggccaccttggtgacaatgatgttgaaaatgtggtgaaaaaaaaaaaaccaaaaaaaaaaaaaaaaaaaaaaaaaaaaaaaaaaaaaaaaaaaaaaaaaaaaaaaaaaaaaaaaaaaaaaaaaaaaaa

SEQ ID NO: 8275 - DNA, 1046 bp, Glycine max
tcgagttcgcctccgtgggccccccccccccccaaaaaccaataacaaaaaactacttgtaaatttttgtgatacgtctaccgttgttgttctcagtctaagatcaccgaggctttccttgttcaatcaaaacacaaaaatggaggggactgttttcactcctgcacttgaaggaattaagcttgtaaaatcagagcaaggagaaattttgacccagcctttcttggatgcttgcaagcatatactgcctgttatagacaagtttggagctgctatggcccttgttaaatctgacatcggtggtaacatatcgagattggaatctaagtattcctccaatccaaccaaattcaactacctgtacagtttggtacaagtagaggttgaaactaaaacggctaagtcatcatccagttgtaccaatggacttctttggcttacaagagcaatggatttcttagtggcattattccaaaacttaattgagcatgcagattggtcaatgtcacaagcctgtacagattcctataacaagactctaaagaagtggcatggctggcttgcaagttcaagcttcactgtagcaatgaagcttgctcctgataggaaaaaattcatggaggtgatacaaggcactggtgatatcagtgctgatatacagaaattttgtactgacttttctcctatctttgaagagaatcacaagtttctggctcgttgtggcttggatgatatgaaggcgtcatgaagtcacgggttcatgatcagaagtctcttgatgaatggctcttgcattcttactctcatgttgagttctaaaactctatgtttctttgtaggcatccagacccagcatgataaacattcaataacttcaatcgtgtaccgcaaattttttgttttgtgcttggtgggatagaatcttgagatattagcacaattttacttggctacaaaaaacttgaactcgcatgttgttaatttattatttattattataaaaacacagatgattagttttgaggctcaaaaaaaaaaaaaaaaaa

SEQ ID NO: 8276 - DNA, 1148 bp, Glycine max
  misc_feature (1105)..(1105): n is a, c, g, or t
  misc_feature (1124)..(1124): n is a, c, g, or t
tcagctacgtaggccccccccccaaatctgattttcattcctcaacgccaacgccaacgccaacgccaattccattcagatcacagtcccttcaattcctgctgcagcatactgtgtgcaacaaagccctaaaatggaggggactgtcttcactcctgcactgcaagaaattgagcatgtaaagtctgatcaaggagaaattctgagcaagcctttcttggatgcgtgcaagcacatattgcctgtaatagataagtttggagctgctatggcccttgttaaatctgacataggtggtaacatatcgagattggaaactatgtattcttccaatccatccagatttaactacctgtacagtttggtacaggtagaggttgaaactaaaacagctaaatcatcatccagttgtaccaatggacttctttggctgacaagagcaatggatttcttggtggctttgttccgaaacttaatcgagcatgaagattggccaatgtcacaagcatgtacagattcgtataacaagactctgaagaagtggcatggttggcttgctagttcaagcttcacggttgtcatgaagcttgctcctgataggaagaagtttatgaacgtgataggaggcactggcgatatcaatgctgatatcgagaaattttgtacaaccttttctcctctccttcaagagattcacaagtttttggctcgatttcgcttagatgatatgaaggcatcatgaatcacagattcagaagttcctgacgagtagctcttgcatgctcactctcatttcatatcaactttattagcatgataaataagcattggctttcatgttgtgccgttaagtactctattaacatcatgtagtgtttctatgtcaatttgttactatcagttggttgtttattatgaaggttaaggctaatggagtttagtaacttgttttctgcaataccgtatagagtatcttggtgattatagagtactaattgactagaatcaaactcatcaaactttggctcaacatatggatggctgcttggtcatataaatcttattcaattataaaacttactactgtttatgaaagtgatgaaanatgtgatctgcattctctntaaaagaaaaaaaaaaaaaaaaaa

SEQ ID NO: 8277 - DNA, 1145 bp, Glycine max
ggctcgagcgagaaagaaaagcgagagtaacttcgaatctgattttcatcccttaacaccaacgccaacgccaattccattcagatcacagtcccttcgattcctgctgcaacatactttcaaagccctaaaatggaggggactgtcttcactcctgcactgcaagaaattgagcatgtaaagtctgatcaaggagaaattctgagcaagcctttcttggatgcgtgcaaacacatattgcctgtaatagataagtttggagctgctatggcccttgttaaatctgacataggtggtaacatatcgagattggaaactatgtattcttccaatccaaccagatttaactacctgtacagtttggtacaggtagaggttgaaactaaaacagctaaatcatcatccagttgtaccaatggacttctttggctcacaagagcaatggatttcttggtggctttgttccgaaacttaatcgagcatgaagattggccaatgtcacaagcatgtacagattcgtataacaagactctgaagaagtggcatggctggcttgctagttcaagcttcacagtagtcatgaagcttgctcctgataggaagaagtttatggacgtgataggaggcactggcaatatcagtgctgacattgagaaattttgtacaaccttttctcctctccttgaagagaatcacaagtttttggctcgatttggcttagatgatatgaaggcatcatgaatcacagattcagaagttcccgatgagtagctcttgcatgctcacacccatttcatatctactttactagcatgataaataagcatcgactttcatattgtgcctctaagtactctattaagaacagtgtttctatggtatctcaaaatttgttacagttagtttattatgaaggttaatgctagtggagtttagtatcttcttgatgatttaccgattggctagaaccaaactcatccaactttggttcagtatatggatggctgcttggttgtataagtctgattcaattataaaatttataacaactgtttttatgaaaaaaaaaaaaaaaaaaaaaaaaaaaaaaaaaaaaaaaaaaaaaaaaaaaaaaaaaaaaaaaaaaaaaaaaaaaaaaaaaaaaa

SEQ ID NO: 8278 - DNA, 1367 bp, Glycine max
aagcaatcgtgcgttctgttgttcttattcttagcctgaccgttacgttataaaaacaccaactccacactttccacactcaattttttcatcatgaacaatccaactcttttcttattgcttgttgcgttctccctcgttttcgcggccgtgtcggcctcttcggacggcggcaacgaggaaccgctgatcatgcaggtggtcgatggcggtgacgtccggctgggagcagagcaccactttttggagttcaagcgcaggttcgggaaggcgtacgattccgaggacgagcacgattacaggtacaaggtgttcaaggctaacatgcgccgcgcccgccgccaccagagtctggacccttcggcggctcacggcgttacgcgcttctccgatcttacgccgtcggagttccggaacaaggtgttgggtctgagaggtgtgaggttgcctttggacgcgaacaaggctcccattctccccactgataatcttccgagtgattttgattggagagatcacggagcagttacccctgtcaagaatcagggttcgtgcggttcgtgttggagcttcagcaccactggggctctcgaaggtgctcactttctgtctacaggggaacttgtcagtcttagcgagcagcagcttgttgattgtgatcacgagtgtgatccagaagaaccaggatcttgcgactccggatgcaatggtggattgatgaatagtgcttttgagtacatccttaaatctggtggggtcatgcgcgaggaagactacccttattctggtgctgatagcggaacctgcaaattcgacaaaacgaaaattgcagcatcagtggcaaacttcagtgtcgtctcactagatgaagaccagattgctgccaatcttgtgaaaaatggccctcttgcagtggccatcaatgcagcatatatgcagacatatatcggtggagtatcatgcccatacgtatgttcaagaaggcttaatcatggggtcttattggtgggatatggttctggtgcctatgcacccattcgtatgaaggagaagccattttggatcattaagaactcctggggagagaactggggagaaaatggatactacaagatttgccggggacgaaatatttgtggggtggactccatggtttcaactgtggcttctgttcatacaactactcagtaggatgttagttgacataaacatagtatttgctatctgttttttttactgtaaaacattaatagctgctcttttttaaaagcggtgccaaaacaattaacctattcaatttaaacagttttagaccctctttatgttatgaaagaggaattgctcttcattcaaaaaaaaaaaaaaaa

SEQ ID NO: 8279 - DNA, 1254 bp, Glycine max
ggttgagaaggcacattaacaatttgaaagtttccccggttggagttggacttatgggctacatgggaaacaaggggtcagtttccattagtatgtctctctttcagtcacgtatgtgctttgtttgttcccatttgacttctggtcagaaggaaggggctgaacataggcgaaactctgatgttcatgaaattctaagacgcacttgcttctcatcatctgtcttcgatgcagatcaaccacaaacaatcccatctcatgaccagattttctggttcggggatttgaattatcgtatcaatatgttggatgctgaggttagaaaattggttgctctaaagaagtgggatgagttgaagaattatgatcagctaagcaaagaattgcgtatggggcatgtatttgatggatggaaagaggggttgataaacttcccacccacttacaagtatgaaattaactctgatagatatgttggtgagagcccaaaagaaggggaaaaaagaagatctccagcctggtgcgatcgtatattgtggctaggaaaaggaataaaacaattacaatatggacgtgcagaaattaagctctcagatcatagaccagttagttcagccttcttggttgaagttgaagtattcgatcatcgcaaactaaaaagagctctaaatttcactagggcagcagtacacccagagatcttccttgatgaagacggcgaaatataatcatgttagacattcatcgtagtactatcatattgaatactgaaagtttaaagcttggctgtctttgaagtcatgttgtgaatgagagacaattgaacttgtatactcttttctaaactgagcttcaagatgtcaaactcaaggagcactcttctcaagttagctcagagggaagcatccattgtgattaactgagatatcaaagcattttgccaatctatgttgcataggaagccattgagatagttataacagtaaactgtatatagtcatacgaaaggatggtttgttctttttttttatccctaggaaacaatcatcattcgattttggccttatcaaacatgtgtgtcccatatattttatatttttggacaataaacaattggggtgggtggtttttctgtaacagtgcacaggttctatgtaaactaatattgatttgagcattgattttcatgtattaatgaccttggctggtttcagcccgatttgttgcaaattacatattacccctttgcttgac

SEQ ID NO: 8280 - DNA, 719 bp, Glycine max
aacaaactgttaagtatgcacaagcaagcgcaacttcaagcaccaacaagggatgctccactcatagagctcaacatagaaactagaaactagaagtagcagtccttaagttttgtgcataaccataaaccatgtcattgcctaccaccactagtggtcactcatctctttactctgcatttacattgccaagaaccactcaaattcacccaaccttgttttctcccaccaccaagttattttcttccagaagcccctcatattcaggtgtttcccattgtttctcaaacaccctttcgccaagaccgctgccttttgctgttaaggcttcatctggggttggctcagaagcatccaaacaggagaatgacaatagtgaagaagaagaagaggaaccgtatgaagagtatgaggtggaaattgagcagccttttggactcaaatttgcaaagggtagggatgggggaacttacattgatgctattgcaccaggaggatcagctgataaggctggagtcttcaatgttggggataaagtaattgccaccagcgcagtttttgggaccgaaatttggccagctgctgaatatggaacgacaatgtacacaattcgcctaagagtgggcccatcactcatgagtatgcagaagagatatggaaagaacattgattctggtggtgagttaactgaaaaggagattatcagagctgagaggaac

SEQ ID NO: 8281 - DNA, 1185 bp, Glycine max
ggtccggaatcccgggccggcccgcgcgtccggggttgcggttggggttggggatgggggtaagcaacaacatcaccgcagtgctgaacttgatagctacgctggcctcaatcccgatcatagcctccggcatttggctggcatcgaagcccgacaacgagtgcgtggccaacttccggtggcccattgtcatcatcggcatcctcatcctcctcgtttccctggccggttttgtcggtgcctactggaacaaacagggtctcctcgccctctacctcttctgtatggctctcctcatcgccctcctcctcctcgttctcgtcttcgcattcgtcgtcaccagacccgatggagcctatgatgtccccggaagaggctacaaggagtacaggcttcacggcttctcctcctggttgaggaaccacgtcaccggttccgggagttggcagaagataaggccctgtttggctgcttctgatgtctgctctaagctcacccaggattacatcactgctgatcaattcttcaattcccatatctcccccttacagtcaggatgttgcaagcctcccactgcttgtgggtacaattatgtaaaccccatactatggacaaaccctgtgaaccctatggctgattcagattgctacttgtggaacaatgaccagaatcagctatgctacaattgtaatgcgtgcaaggctggtctattgggtaacctcagaaaagaatggaggaaagcaaatatcattctcattgtggcagtggtggtcctcatatgggtctatgtcatagcttgtagtgccttcaggaatgcccaaacagaaaacctcttcgaccgttacaaacagggttgggtttgatcccgtttccccccccaacatttacaagtttttaacgctgcttcttttgtttttttggttacctttccttctttctttctattccctgtaattccgttttttaagtctttttgtctttagtgtacatattccttctgtttagaaacacggtattggaagtaatacgtttctcgatgctcaggaaaaaacgaagaatagaatattctaataatcctttcgctgagctagcgtgtgattagaatttagattaattatatattcaattgttattctatactcctattttcttttgaataaactttggtacttgatgcggctatcc

SEQ ID NO: 8282 - DNA, 1797 bp, Glycine max
cgattgggtaccgggccccccctcgagtcagcttcctaggcccccccccccccccgtgtggtgagaggagttggaagtcgtgttccgcctgttagacctattagtgtgagaagtagacgtcctgtcacatccatgctagaaagatccaggccagtggctcctccagctagaagctatgacaggagattggctgctcctgcatatccaaaaagtggcatgaaaaccgcgcgtccgcgacgtgtgaatctaccacctccgagaaatagagttgctgcagattatggctctaggttagcctctcagaggcacacatctcatagggattatcctgcccgtggctctaactaccctgagctgcatagaagtacatctcgtggttctgcaccaaagagaggttatgttgatgatggccatggccaaagatttgagagggctcctcctcctcctcctcctcccccccatctaagttaccgtgaaggacggccacgcgattatgacactctatctggctcaaaacgtccttatactgatatagatgatgttcctcctcggtatgataccagtgctcgccaatcaagatctcgtttaaattatgactatggaggtagtgcttcacagtatggagatgcttatggtgacagacttggaagatctagtcttggatatagtggcagcagaaattctatttctagtcaagacttacatggtacatatggcagtcgacaaggcatgagttatggcggaggttcttttggtggtagtgatggtggtatgtactcatcaagttatggtggcgattatgcatcccgtggaagtgatgttggtggccgttcatattcatctatgtattctggtagaggggtgggtggtagcagcaattatatgggtggtggtggatctgggtcttattattgagatctaattacaataaagaggctgctgtaggatgtggaatttgaagcttatgctcattatgatgcctaccatgtggagctgaacattgctaattaattgcctggtttgggtatttatcaaagatcaagggttatgccaattcaagtcttctctcagatggacgaattttgagttcttcaatttgtgctgtaagtactgaagctgattagaaatggaatgagaagtgctgagcatgtgatgtataaataaacttcgtattattaagctcccttatgggtgggtaatttgaaagatcactccatatcctgttcatttggaaagaaccaaggcctcagatattactttttgatattggattttttctcctgtcataaagttggtttttcccctcacaaaagagatatattgttactctttggattcattatattttcgccaatggtatgatcatgaacaagagtacccagcactttgtggagctaccattggtagtagttatatgagcactacttcggcaataaataaaggaaagattttgatatagtaacatatcctaggaagcatcatgcactgattatgtgtggctagagtgtttctaacatggtattttgtactgagggggagtacaagatgcatatggagcattgcatatttttccttaagattgtttacttgcaccccttggaatttttctttgtgatgcaattatttttgcgcacttcattactatccaatccaattgcataatattggaagacatttgcccatgctatatcattggaaaatgcaactttgcgagattgtatagtagctggaatggattcaatatcatgtgttaccaacagattttgaatttcaagaatctatggaatttagcatttt

SEQ ID NO: 8283 - DNA, 1370 bp, Glycine max
tcagctacgtaggccccccccccgttgagcaagcaagaagagctgtggtggagctaaaaaatccagtgattaatggcaaacaatgtggtgttactccaagtcaggacagtgatactctctacttaggtaacatatgcaagacatggaaaaaggaagctttaaaggagaaactgaaacattatggagtagaaaatgtggaggatttgactttaatagaagatggcactaatgaggggatgaaccgaggatttgcatttttggagttttcatctcgttcagatgctaaggaagcctacaggcgactgcagaagagagatgttgcatttggagttgataagcctgcgaaggtttcctttgctgactcctttattgatctgggtgatgaaattatggcacaggttaaaactgtatttgttgattcgctgcctccttcatgggatgaagtttatgtccgagatcttctcaagaaatatggagagattgaaaaaattgagcttgctaaggacatgccagctgctcggaggaagaattatggatttgttacatttagtacacatgttgctgctgtggaatgtgctgatagcattactagtgcagggttaggtgaaggtgacaaaaaggcaaaagttagggctagattgtcacggcctctttcaaaacctcttcagagaggccgtggaaaacatgttaatcatggggactttcgttctggccgcaattctggaagattggtaagatcttcacggagtcgacctgcaccacgtagtcttcctgcccgtgtggtgagaggagttggaagtcgtgttccgcctgttagacctattagtgtgagaagtagacgtcctgtcacatccatgctagaaagatccaggccagtggctcctccagctagaagctatgacaggagattggctgctcctgcatatccaaaaagtggcatgaaaagagattatagacgacgtgtgaatctaccacctccgagaaatagagttgctgcagattatggctctaggttagcctctcagaggcacacatctcatagggattatcctgcccgtggctctaactaccctgagctgcatagaagtacatctcgtggttctgcaccaaagagaggttatgttgatgatggccatggccaaagatttgagagggctcctcctcctcctcctcctcccccccatctaagttaccgtgaagaacggccacgcgattatgacactctatctggctcaaaacgtccttatactgatatagatgatgttcctcctcggtatgataccagtgctcgcccatcaagatctcgtttaaattatgactatggaggtagtgcttcacagtatggagatgcttatggtgacagacttgga

SEQ ID NO: 8284 - DNA, 1774 bp, Glycine max
agattgaaggctgcggttttaattcttggtgctggtcgggtctgtcaaccagctgccccacgcgctcctcatcatttggaaggccatcatcgagccaatggtataaaacattgttggaagatgattttgaatgtcaaactgatgtagaagtcattgtgggatctctgtacctgaaggatgcagagcagactgttgagggcattccaaatgtaaccggagttcagcttgatgtgatggatcgtgccaatttgtgtaagtacatttcacaggttgacgttgttataagtttgctgcccccaagttgtcatattattgtagcaaatgcttgcattgagctgaaaaaacatcttgtcactgctagctatgttgatagctccatgtcaatgctaaatgataaggctaaagatgctggcataacaattcttggagagatgggcttagacccaggaattgatcatatgatggcaatgaagatgatcaaccaagcacatgtgaggaaggggaaaataaagtctttcacttcttattgtggtggacttccatctcctgaagctgctaacaatccattagcatataaattcagttggaatcctgcaggagccatccgagctgggcgcaatcctgccacctacaaatggggtggtgaaactgtacatattgatggggacgatctttatgattcggctacaagactaaggctaccggaccttcctgcttttgctttggaatgtctcccaaatcgcaattcattacttttaagggatttgtatggaataactgaagcatcgaccattttccgtggaaccctccgctatgaaggatttagtgagatcatggggacactgtctaggattggcttatttaacaatgaagctcattcgttgctaatgaatgaacagagacaaactttcagaaaattcttatttgaacttctcaaagttgttagcgataatccagatgaactattgataggagagaatgacatcatggagcaaatattaatacaagggcactgcaaagatcaaagaacggcaatggagacagcaaaaacaatcattttcttgggacttcttgaccaaactgaaatccctgcttcctgcaaaagtgcttttgatgttgcttgtttccgcatggaggagaggttatcatacaccagcacagaaaaggatatggtgcttttgcaccatgaactggaaatagaatacccagatagccaaattacagagaagcatagagctactttacttgaatttgggaagactcttgatggaaaaaccacaactgccatggcccttactgttggtattccagctgctgttggagctttgcttttattgacaaacaaaattcagacaagaggagtcttaaggcctatcgaacctgaagtatacactccagcactggatattatagaagcttatggcatcaagttgatagagacgaccgagtaattttcatctatgaattgatgtataggtgtaaattaatgtacaccatgcaatgtttgacgtgaataggataaaatataataattactgagtttatggaattgcaactaccattctataccagtgtcagaaatggaccacacggtaccagcatagttataacacttacacatgaagatgccaatttcaattgcagcagtacaatccaaccggtaatgaaattctagaaaaattgttaattggtgatcaatgaaactactccctcctttcttatttatcagacttaattacttaatttattaagaataaaaaaaataattaattta

SEQ ID NO: 8285 - DNA, 2354 bp, Glycine max
  misc_feature (2169)..(2169): n is a, c, g, or t
tcagctacgtaggccccccccccaaaaaaaattgcaatttaagaacgagctcttgtgttgtactcttgcatctgtattcttccatctttcctcgttttacactctttaaagaagtaaacacccctctctgagtctctcacctcaccaccacccacctgaacaatttccctgcacccaacacggtttcaaatatcactcccctataaaacatccttaaaaacggttaaacacccaaaaggggttttcaatttcacgcaattccttccattcccacaccaacaaaaaaaaaaaaaaaaccatcacacatattactacattataattgctatagattatgaagaaattgaagaattactacatgcacctccggcaccaccacacggcggagcgcaagtgggtgttcccactcgccatcggctccctcctctccctcttcctcctcttcctcgctaccctaacctccccggagggcacccccattctcccattctaccgctccatcaccgccgcctcctactccgtcttcgtcgaatccaagctccgccccctccccgtctccgccctccctcccccgccgcgcctcgcctacctcgtctccggctccaagggcgacggcgccgccgtcacccgcgtcctcctcgctctctaccaccccaacaatcgctacgtggtccacctcgacctcgagtcctcggcggaggagcgctccgatttggtgaggttcgtggagggccacgcgctgttcaagcggttcgggaatgtgagggttatcaagaaggcgaacctcgtcacgtacaggggacccaccatggtcgccaacacgctccacgccgccgcgatcctgcttagggagctcggggattgggactggttcatcaatctcagcgcctccgattacccacttgtcacacaggatgatctgctgcacacgttttcctacttgccgcgggatctgaatttcattgatcatacgagtgacattggatggaaagatcatcatcgtgccaggccgatcatcgttgatccggggttgtatatgaataagaagcaagatgtgttttgggttacgcagaggaggagtaggccaacggctttcaagcttttcacaggctcagcttggatggcactgtcaaaatctttcattgattactgcatatggggatgggacaacctacctcggactgtactcatgtactattcaaatttcatatcttcccctgaaggatacttccacacagttatttgcaatgctcaagagttcaggaacacaactgtgaacagtgatttacatttcatttcttgggacaatcctcccaagcagcatcctcactaccttacagttgatgacatgaaaggcatggttggcagcaatgctccctttgcaaggaaattccacagagaagatccagtgttggacaaaattgatgctgaactattatccagaggtcctggaatggctgttcccggaggttggtgcataggaaaaagggagaatggcaccgatccctgctctgaagtcggtgatcctaacgtcctgaggcctggccaaggttccaagaggcttgaaacattaatcagctcattgttgtcgaatgaaaagttccggccaaggcagtgcgtatgaggtgaagaagaagaagaatcaaatgggctaaggcagtcttctagaaaagattatttttcactggctttagtttacacgtgctcatttagttaggatgatcagtaaattagtgtttctttcaagtaggagaagaaatagtgaaagcatacagtctttgatattgagaagaaaaaaaaaagtgagacaaattctggtgaaatgtgatgactagagagttggatcacacactgtaatagtatggtatatatgacagttgactctgttgtccctggtcacctcttcccccctagcttttctgtggaacacgaaagggataaagaggatgacatgggcggggggacggacaaaagaacagaaactgtgccaaatgaaatggaaatactttttatgaaaaaaaaaaaaaaaaaaaaaaaaaaaaaaaaaaaaaaaaaaaaaaaaaaaaaaaaaaaaaaaaaaaaaaaaaaaaaaaaaaaaaaaaaaaaaaaaaaaaaaaaaaaaaaaaaaaaaaaaaaaaaaaaaaaaaaaaaaaaaaaaaaaaaaaaaanggggggggcccctttaaagggaccaagttttttcccccgggttggggaaataaattttttttttttggggccccaaaaaaaaaataagggggggggtttttaaaacgccgggggggggaaaacccgggggtgccccaaaaaaaagacctgggaaaaaaaccccctttttccacggggggtaaaaa

SEQ ID NO: 8286 - DNA, 1320 bp, Glycine max
tcgcggctgcgacgtggcgcccccccccgacgccttctcagactcagaaaagagaagaaacaaaacaaaaaagagcagagagagagaggaaccatcaccaaccctaatttcttagctaaaccctattcgtttagcatttcctctcttttctcccactcgtaaatcctctcccaaacttttcagatccaaataaatcatggttttctgggtttttggctacggttcactggtgtggaaccctggattcgattacaatgagaagattataggtttcattaaggactacagacgcgtgtttgatttagcgtgcattgatcaccggggaacacctgaaaacccagcaagaacttgcacgttggaggagaaggaaggggctatttgctggggagctgcttattgtgttcgaggaggccctgaaaaggaaaaactggctatgcagtatttggagcgacgggaatgtgaatatgacagaaagactcttgtaaacttcttcaaggaaggagattcactgcaccctactttaactgatgtaatagtattcacatctactccagacaaagtgaacaacaaatactacctgggacctgctccacttgaagacatggctaggcaaatagcaactgcatatggcccttgcggaaacaacagggattacattttccttctagaaaaggccatgtatgatattggccatgaggatgacttagtgatagagcttgccaatgaagtgaggaaagtacttggaatgggaaatgtagtaccaaaggagaagaaactggttggagcagcacaacttccacaccctcctcatgtaacaatccctacccttcaactgcacccactgccagaacctattgcaatggatatatagctgaggggggagatgaccaaaaactgacgctgagttcggctactaaactgatttcctgctaaccctcattcaaatttaaataacatcacatatctattcctcttcgcctacttttagcggctttccagccattcccttgagatattgcttaaattcagtgaggcgcaatattttgaattggaatgttcgcggatattttacttctgcagactgcagtgttattattgaaaaagtttcattttttttatttatttcgtttacggcgatcttacacagttttttttatatcagttctgcattcaatcttaccgagttaatagctagctagtacttcgaaatgaataatacttctgttttgaggaaaaaaaaaaaaaaaaagaagattcccctctatttgtgtttcgtgtattcgcgtttggttaaaatataattttttttcttattttttt

SEQ ID NO: 8287 - DNA, 823 bp, Glycine max
tacggctgcgagaagacgacagaggggggtgaggctcggtaactgtcagcatcattctgccgtcgacgaagctgaaacttgtttcttcttttccttgcgcgaaccttttctactaaccccaatcgcttctctcccactccaattccccattcctcatctacataaccctaaccccacactctcacacaccaccaccaacatcatatattacatcgattctcaatcaaatcccaaacgttttgaaaccaccgtcacgatgatgctcagaattcgtagccgcgacggcctggagcgagtgagcgtcgaaaacccccacagcacaacagtgtcatacctaaaacggatcatcgaaacccaattgggaatccctgttcacaaccaaaccctgtccacaaaccagaacctcctcttggcaaaatccctagaagatctccaccgattcaccgacatgtccaaccccgacgcgcctctctcgtctctcaacctcggccacggctccatggtcttcctggcctacgagggtgagcgccgcgtggccggccccgccttcaaccccgccggctccttcggccgcaagatgaccatggatgacctcatcgccaagcagatgcgcgtcacgcgccaggagaatccgcactgcgagctcgtctcctttgaccgcgactgcgccaacgccttccagcactacgtcaacgacactctcgccttcgccgtcaagcgcggcggcttcatgtatggcaccgtctccggaggagggaaaggtcgaggtggacttcatctacgagcctcctcagcagggttcggaggacaatctcgtcttttt

SEQ ID NO: 8288 - DNA, 1772 bp, Glycine max
catccttctggcgccgacggtgaaacttgttttccttgcgcgaagctttggcattcccccaatcgcttcatcctcatctacttaaccctaaccccacactctcacatactacatatataaaaccgccgtcacgatgatgctcagaattcgtagccgcgatggcctggagcgagtgagcgtcgaaaaccccctcgccacaacagtctcggacctaaaacggattatccaaacccaattgggaatcccggttcacaaccaaaccctctccaccaaccagaacctcctcttggccaaatccctcgaagatctcctccgattcaccgacatgtccaacctcgatgcgtctctctcgtctcttaacctcggccacggctccatcgtcttcttggcctacgagggcgagcggcgcgtggcgggccccgccttcaaccccgccggctccttcggccgcaagatgaccatggacgacctcatcgccaagcagatgcgcgtcacgcgccaggagaatccacactgcgagctcgtctccttcgaccgcgactgcgccaacgcgttccagcactacgtcaacgacactctcgccttcgccgtcaagcgcggggggttcatgtacggcaccgtctcggaggagggaaaggtcgaggtggacttcatctacgagcctccgcagcagggttcggaggacaatctcgtctttttcagggaccccgaagaggagaagtttgttgaggctattgcggtggggttggggatgacgaaggttgggtttattttcacgcagacgattactcaggataagaaggattacactttgtcgaatagggaggtgcttcaggctgtggagtaccatgccgagagtgggttgaaggagtgggctactgcggtggttaagcttgaggtgaatgaggaaatgggtggtgctgatgtgcattttgaagcgtttcagatgagtgatgtgtgtgtgaggttgtttaaggaagggtggttcgagacggagatcaaggaggacgatgatcccaagttgtcgaagatgaagaaggatgtggttgtcggggttaaggatactagagaggttgacaatgatttcttcttggtcgtcgtcaaaatcgctgatcatcagggtcctctttcatcatcatttcccattgagaaccggaacactcaagtgactatgaaggctttgaagaatcatctggaacggtcaaaaaatcttccatttgtgaagcgaatttctgattttcatcttcttctcgtattagcaagggttttagacctgaatgctgatgttcctgcattgacggaatgtgtgcagacacagacttctgttccagaaggttatcagatccttattgagtctatggcaagcactgcttgatgctgtatgcagttgttctggactcatggtgacacgagaattatgcactttacgttcaggtcctttgcagcaacatggtgcatattgccccatagcactcaaggaatgtttcgtatgttggtaatttgtacattgcttctttattgctgcggaaaatctcggatctgtcattttactgaaaatgagctgatgtggtttacatgttttaatgtttaaattaattagagatagctccttctaatagttactattttaagtgcgatactgctacaaaaattatagaatgaagacaatgtttaaaatgtgtgctcaaggccaccggaatgtctttctcgggcattgtgagcgtggagtccaatgtcccccttggctatgaatattaaattcatcctatact

SEQ ID NO: 8289 - DNA, 1583 bp, Glycine max
  misc_feature (1526)..(1526): n is a, c, g, or t
  misc_feature (1528)..(1528): n is a, c, g, or t
  misc_feature (1532)..(1532): n is a, c, g, or t
  misc_feature (1535)..(1535): n is a, c, g, or t
  misc_feature (1537)..(1540): n is a, c, g, or t
  misc_feature (1542)..(1542): n is a, c, g, or t
  misc_feature (1549)..(1549): n is a, c, g, or t
  misc_feature (1551)..(1551): n is a, c, g, or t
  misc_feature (1558)..(1559): n is a, c, g, or t
  misc_feature (1562)..(1562): n is a, c, g, or t
  misc_feature (1564)..(1565): n is a, c, g, or t
  misc_feature (1570)..(1570): n is a, c, g, or t
  misc_feature (1572)..(1572): n is a, c, g, or t
  misc_feature (1574)..(1574): n is a, c, g, or t
  misc_feature (1577)..(1579): n is a, c, g, or t
  misc_feature (1581)..(1581): n is a, c, g, or t
actttcctctttgaagtttgaagtggtttggtgcaattcttccttcagctcttgtttagtccaaaaccgctcttcttcccttccttccacagaccacagtattagcctcaacacacgctctatctattataaaatccaccctcttcttcccttgtctgcaacaacaataacaatcttcatcatgcacaagagctcttcagattccacgttgggcccgggtggcctggacctctcccaggccttcttcaggcccataaacaacgccgcccctccctccccgaccaagcgccacaacaagatctccgtcatcggcgccggcaacgtgggaatggccatcgcgcagaccatcctcactcaggacctcaccgacgagctcgtcctcgtcgacaccaactccgacaagctccgcggcgagatgctcgacctccagcacgccgccgccttcctcccccgcaccaagatccacgcctccgccgactcctccgtcaccgccggctccgacctctgcatcgtcaccgccggcgcccgccagatctccggcgagtcacgcctcaacctcctccagaggaacctctccctcttccgcgccattattccccctctcgtccgttactcccccgacacaactctcctcatcgtttccaaccccgtcgacgtcctcacctacgtcgcgtggaagctctccggcttcccctccaaccgcgtcatcggctccggcaccaacttggactcttcccgcttccgtttcctcatcgccgatcaccttgacgtcaacgcccaggacgtacaggcatatatagtaggggagcatggggatagttcggtggcgttatggtctagcattagcattgggggtgttccggttctgagctttttggagaatcaacagattgtgtatgagaaagagacgttggagaacatacacaagtcagtgatagacagtgcgtatgaagtgatcaagctgaaagggtacacttcatgggccattgggtactctgtggctaacctggcccggtcctttatcaggaaccagaggaagattcaccctgtgtctgttctggctaaaggcttttatgggatcgatggagaagtgttcctgagtttgcctgcaatgattggtagaggagggatactgggtgtgaccaatgtgcacttgaatgaagaggagacacagaggcttagagattcggccaagaccattctcgaagtacagactcagttgggtatttgaattttctgtgatgggtactgcttttttttttcctttaattttcttttgttcttcccaccagcatgatgtggtttggcctaaattattagtagtacttgctactgttagtgttagttcctgccctcttcttgcagtgcaagtgtttttgttgcgtcaagtgctggctggatctcgtgagatgtgttttgtttcctgtatggttttaattagccaagtaaaatttcatatttctgtagttgccgtgttttgtgcctctattcagtcaattacggaaaaagatcttcatttcggggancncttnttntnnnngnggccccncnggggggnnccncnnttttntncnttnnngngg

SEQ ID NO: 8290 - DNA, 1504 bp, Glycine max
ctcgcccgcttcagccgccccgggagtgaatattactattactaacactattcttcagccacacgctctctatccatctattataaaatctaccctcatcttaccttctcttctacatttgcagcaacaacacatttaatcatcttcgttcttcataataataataatgcacaagagcgcttcaggttccacgttgggcccgggcggcctggacctaacccaggccttcttcaggcccataaccaacgcggctcctccctctccgaccaagcgccacaacaagatctccgtgatcggcgccggcaacgtgggaatggccatagcgcagaccatcctcactcaggacctcaccgacgagctcgtcctcgtcgacaccaacaccgacaagctccgcggcgagatgcttgacctccagcacgccgccgccttcctcccccgcaccaagatcaactcctccgccgattcctccgtcaccgccggctccgacctctgcatcgtcaccgccggcgcccgccagatagtcggcgagtcacgcctcaacctcctccagaggaacctctccctcttccgcgccatcattccgcctctcgtccgttactcccccgacaccattctcctcatcgtttccaaccccgtcgacattctcacctacgtcgcttggaaactctctggtttcccctccaaccgcgtcatcggctccggcaccaacttggactcttcccgctttcgtttcctcatcgccgatcatctcgacctcaacgctcaggacgtacaggcatatatagtaggggagcatggggatagttcggtggcgttgtggtctagcattagcatagggggtgttccggttctgagctttttggagagccaacacattgggtatgagaaagagacgttggagaacatacacaagtcagtgatagatggtgcctatgaagtgatcaggctgaaagggtacacttcatgggccattgggtactctgtggctaacttggcacggtccttcatcagggaccagaggaagatccaccctgtgtctgttctggctaagggcttttacgggatcgatggagaagtgttcctgagtttgcctgcacttgttggtagaggaggggttctgagtgtgaccaatgtgcacttgaatgaagaggagacacagaggcttaaggactctgccaagaccatccacgaggtgcagactcaattgggtatttgaattttctgtgatggtcacgtggatatccggttactgcttttttgtccttaagttttcttttgttcttctccccatgatgatatggtttgacctaaattattagtacttgctgctgttagtgttagtccctgcccccttctggcagtgcaagtgtttttgttgcgtcaagtgctgacccgtgtcttgtgagatgtgttttgcttcctctatgattttaattggccaagtaaaaattcatttttatatacttgccaaaataagtgcctcaaaaaaaaaaaaaaaaaaaaa

SEQ ID NO: 8291 - DNA, 1395 bp, Glycine max
ggtacgacctgcaggtatctcggtccgccggttcccccggtcgacccacgcgtcccaaaaaccctttcgcttattttattatcgttttcctttctcccgagtgttctcctttcttgcttccttctccggccatctttatcctgatggcgtcgtctctgggaattgcttgcggtggaaacaacgccaaattagggatcccaaagcagcggtgtggttcggttcttcagccgccgtgctccctcgctatggggcgctcgacggcgagggtggggaggatcacggcggcgatggccacggccacggcggtgatgaccacggccacggcgaaggagcaagagactaccactccgatgatgatggcaatggagctgttcgggaaacgcgatggaggagccaaaaacgacgctgttgagggacaggagaggctggacaggtggatgagagagtcggtggtggagatcgtgaagaatttgaaagaagcgcctctgctggtgcaggtttttcccaaatcggcgacgatgacgacggagaagaggatggtggtggaggactggccggcggtaaaggagcgctgggaatccggtgagacgccggtgccggagggagtcatattcgtggaggagttggacggagacacggcggaggatggcggcggagagaggacgacgagggcgtggggggtggtggttcaggggaagggcgtcgggtgcggcccggtttgttatcttttaaagaccgttcgggtcgggtcaggacccggttcgggaatggggatttgttcgacccatttttgtttggtgaaagtgaaggacttcagggaaacggtgcagtcgcagctaaaaaattgttggcttttgcagagccagtgccagtggaataactataaatgaatcaatgaaaatattcaatattgtacatttttttctcattgagtaatttttttttggtgccacggttgttgcaattattatagccaatagattttcgactgtgaaaatgtacagagtgaaataccttttaagggaagttcgtcttcttcaaactgtcaaatattattattattttgcattactatcaatcaaggctgccttgccccgtttcttgaagggtttacttttattgaattttattatttggtcttcatttgatcccaagtaatgaaggggttcttactagtgtttgcattttttggtgctacctgtagctagttgatcttattttatttatcattgtttggttcatttaatcattcggttaattcaagattgaatagatgttgttccatggtagtgcaatgatagtattgctagggctctgtacacacactacagagtgaatatatgatcatgtgattttgttcttcatttgatcacaactaatgaaggagtttttgtt

SEQ ID NO: 8292 - DNA, 1558 bp, Glycine max
ggaaagaaaaagagtcccttgtcagcaacatcattattgctgatgtcattttcactttaggatcagtattttcctttcatcagttcatgatttctctctgatccttttgtctataaactgaactgaattgagtctcaacaacccagttgagtaactaagatggcgcaagtgaggaacaagcaagtgcttctaaaggactatgttaccggttttcccaaagaatccgacatgaatattgtcgaaagtaccataacattgaagcttccacaaggttccaatgatgtcttgctcaaaaatttgtatttgtcttgtgatccgtatatgaggaatctcatgaacaggcccgaaggccctcccaatagtcgtgcttacactcctggctctccattaataggatatggtgtgtctaaagtcctggaatctgggcacccagattataaggaaggtgatttagtgtggggctttaccaaatgggaagagtatagcttgttaccctcagctcaaatactcttcaaaattgagcacactgatgttccacttacctactacactggaattcttggtatgccaggagtgactgcatatgcaggtctatttgaagtaggatctcttcagaaaggagaaaatgtttttgtttcggctgcctctggcgcagttggtcaacttgttgggcaatttgctaaactgaatggttgttatgtagttggaagtgctggatctaaagagaaggtggatctgctgacaaataaatttggatttgatggaggttttaactacaaggaagagcctgaccttgatgcagctttgaaaaggcactttccagaaggcattgatgtttactttgagaatgttgggggcaagacacttgacgccgtactcctgaacatgagagtccgtggtcgcatacccgtctgtggaatgatctcacagtataatcttactcaacatgaaggtgtaacaaatttggcacagatcatatataagcggattcgtttgcaaggctttaacttcatggatttcgttcacctatatcccaagttcttggagtttctcctgccaaatatcagagaggggaaggttgtgtatgtggaagacatagctgaggggcttgagaatggaccttcagcattggttggcctttttagcggtcgcaatgttggaaaacaagtgctcgttgtttctcatgagtaaaaagcatttgtttcttgtgttcaatgggaagttatcagttttatttctggtttttttgctgaaaaattggctgtcttgacatcacctttgcagtcaccttcgtcaactgtatgatgatgctctttgttcttgatagtcctgagagcagtatcaaatgtaatgcacagttgtttctcttgaataaaagcatttgctttttctataaaaaaaaaaaaaaaaaaaaaaagaaaaaaaatagccagctagtttccggtcgcgtggtcatttgatccttgaaaatgtcatgatttatggctaagatcggataaaaatgtttactcaactggctgtcctcaggacagtatcaatctaatatacagttaaaaaa

SEQ ID NO: 8293 - DNA, 1664 bp, Glycine max
gcacgagattcatccaggtgtcagctacgtaggccccccccctcacttgcttccagaaatcagaagttctctgatctagtcgtgaaatgccttatcaagcttacaaaggttcttcagagcactatctatgatgttgaccttgatcgcatacttcaaagcatccatttgtacctgcaagacttgggaatggaggaaattaggagaagggctggtgctgatgacaaacctttacgaatggtaaaaactgtactgcatgaacttgtcaagcttcgtggtgcagcaataaagggtcatctttcaatggttcctatcgatgctaaacctcaacccatcatccttgcctacattgaacttaatcttgagactttggctgctgcaagaatgttgactgcatctggtcctgggggacaaaaccattggggtgattcagcaaccaataattcagcctcgggcacccattcagctgatgcccagttaaagcaagagctggctgctatatttaagaagattggggagaagcaaacttgcacaattggtctatatgaactatatcgtattacccaattgtacccaaaggttgacatatttgctcagcttcaaaatgctagtgaggcatttcgcacctacattagagatggtcttgctcagatggagaagaatgctgcagctggaagaactccttcaagtttaccgatgcctacccctccaccggcatctttaaatatatcttctccggattttgcacctctctcacctgtaaacacaaatccactgggtgatgctaaattaaatgtgaaacctgatccgacaaattttaatttacccccatcatcatacaatgaggagaatagggccgtgaatgccattacttctagagcattaaattctgactatacattaggtgaccaaagaaatgatagatttatgacaggagtaaccagtggaacattggatgcaatcagagagaggatgaagagcatgcaattagcagctgctgctgggagtacagaatctggtggtaggcacttaacaagtgcaaatgacaacttgaatcatggacttcctcctcctagccagattcctcatgcatcagagcatgttggtactgagaatacaatgcacggtggggtacttcctatggatgagaaagcattgtctgggcttcaagcacggatggaaagattgaaaagtggatctcttgaacctctgtaaaggtaaagagaaaaaaattccttactatagtcagagacattattcccattgatgcagtggcatacaagcatgtcgtggtcataattttcaatacgggtgggtatagatgagaaatatgtataataatcaatcgaagctattatcgcctgcaaactatggaactgtgacgttgcagagcgtcggaggattagttgctgtccggttatcacacttgcaattatttcacctcatgatttgccctcttggccgttgtatattgtagtggagctgtgtctttgtaacatgaattatgtaggtgcgtcaattaaatgcaattttacaaaatcatttgttagtgatgctgagcagctgtgcttggtgttgtcacattagcttgtttcaggaattttgacagtggtatttcaagaaaaaaaaaaaaaaaaaatatagggcaccatggtcaatgttctggg

SEQ ID NO: 8294 - DNA, 2087 bp, Glycine max
tcgagcagctacgtaggcccccccccattacacaattcaagcaccttcttctctcgtgtttcacaaactaaagaacaacaatatgcctccaatcttgccggatttctccaactcggtgaaactcaagtacgtgaaactagggtaccaatacctggtgaaccacattctgactctcactctcatacccatgatgatcgccatcttcatggagattctacgcttaggccctgaagagatcctgaacctctggcactccctccacttggaccttgtccaaatcctctgctccgccttcctcatcatcttcatcgccaccgtctacttcatgtccaaaccccgcaccatctacctcgtcgactacgcctgcttcaagccacccgtcacctgccgcgtccccttcgcaaccttcatggaacactccaggctcatccttaaagacaaccctaagagcgtcgagttccaaatgcgtattctcgaacgttccggtctcggtgaagaaacatgtctccccccagcaatccactacatccctcccaagcccaccatggaggccgcccgaggagaagccgaacttgttatcttctccgccatggattctttgttcaacaaaacaggtctcaagcctaaggacatagatattcttattgtcaattgcagtcttttttctcccactccttctttgtctgctatggtcatcaacaagtacaagctcaggagcaacatcaagagcttcaacctctccggcatgggttgcagtgctggcttgatatccgttgacttggctcgtgaccttctccaggttcaccctaactcaaacgccgtcgttgtaagcaccgagatcatcacccctaactactaccaaggcaaagagagagccatgcttcttcctaattgcctcttccgaatggggggtgctgctattctcttatccaaccgaacctccgaacgcaggagagccaagtacaggttggtgcacgttgttcgcactcacaaaggcgctgatgacaaagcctaccgttgcgtttttgaagaggaagacagagaagggaaagtggggatttcacttcagaaggatctcatggctattgcaggtgaggctctcaagtctaacattactactatgggtcctcttgttcttccggcttccgagcagttgctgttccttctcactctcattgggaggaaaatcttcaaccccaaatggaagccttatattcctgacttcaaacaagcctttgagcacttctgcatccacgctggtggacgtgctgtgattgatgagcttcagaagaatcttcagctttctactgaacacgttgaggcttctagaatgacccttcacaggtttgggaacacttcgtcttcttcgctgtggtatgagctcaactacattgagtccaaggggaggatgaagaagggtgatagggtgtggcagatagcgtttgggagtggctttaaatgcaacagtgctgtgtggaagtgcaacagaagcattaagacaccggttgatgggccttgggctgattgcattgatcgttacccggtcgatattcctgagatcgttaagctctaggatggagaattgttcaagaacaagaagataattgcttattttatgaaaaaaaaaaatagatgagttctcataacccttctctatctgctcaccgtagccgtaccacaaatctctctcatttgtcagtcatattggttattttatcatatatcatatcccacttttatatatatatattttttttctgtttatttcaaaacaattacatgggcctcttgtgaattagcacagaaatcgatcgccaactgggagggggtctgtgtttattcatgaatttgtgcaacatgtacgtaaggaaaacacagtttctatttcaagtttgtatttgcttgcactattattggaaagcttgtaattaggacttgaaatgtaagaagtgctttgctttgttgttgttgtcttgtcagcgagatcatatcattaaattaaagtttcattagcatgaccaaaatgaagtgctttagctataagattgtctggttgtgtgtgaggaaatgttacatttaagaagccg

SEQ ID NO: 8295 - DNA, 1570 bp, Glycine max
cgcgtccgtacggcttcgaaaagacgaaagacgcgcagtgcagaggtgtaataaattggtggcaagtggcaaccggaaagccagagtgtgtggttccgtttgctgacctgacctcggaaatccaaagagggaaactcacggtgtttcgttgcgttgtgctctgctctgctcctttgggcctgggctgggctgggctgggctgggctgggcatggctattgcagcagcggccgtggtggtaccattgggcctgctcttcttcgcctccggcctccttgttaatctcattcaggcaatatgctatgtcgtcgtaaggccggtgtcgaaaagtttgtacagaaggatcaaccgggtagtagcagagctcttgtggctggagcttgtatggcttattgattggtgggcaggagttaaggtccaaatattcacagatcatgaaacctttcgtttaatgggtaaagagcatgcacttgtgataagcaatcacagaagtgatattgattggcttgttggatgggtttcagctcagcgttcaggttgtcttggcagcactctagctgtgatgaagaaatcttcaaagtttctgccggtcattggctggtcaatgtggttttctgagtatctttttctggagagaagttgggccaaggatgaaagcacattaaagtcaggcatccagcgactgagtgatttccctcttcccttttggctagctctctttgtagaaggaacgcgttttacacaggccaaactattagctgctcaggaatatgccacttccactggattgcctgttcctagaaatgttttgattccaagaactaagggttttgtttctgcagtaagtcatatgcgctcatttgttcctgccatttatgatgtaacagtagccatccctaagagttcccctgctcctacaatgctaagactcttcaagggacaaccttcagtggtgcatgttcatatcaagaggcatttgatgaaggaactgccagatacagatgaggctgttgctcaatggtgtcgagatatatttgtggccaaggatgctttgttagacaaacatatggctgagggtacttttagtgatcaagagctgcaggatactggtcgaccaataaagtctcttctggtagttatatcttgggcgtgtctggttgttgcggggtctgtaaagttcctgcaatggtcttcgttactctcttcctggaagggtgttgcattttcagcttttggtttggcagttgttactgcacttatgcaaattctgattcaattctcacagtcagagcgttcaaacccggccaagatcgtgcctgcaaagtcaaaaaacaaggggtcttgatttatttggcgaacttaaagttgcatttatgtgtgatgagtgactcatgtaatactcattattttgctttcaacatcttatcatagtatgcttctattctatatatgtactattatgaatgcttatcgattcattgtttttaatttaattaggatatccttttgtattgacagtataggggatggcctagaaaaattcaaccacctattttattttacttttggcc

SEQ ID NO: 8296 - DNA, 1605 bp, Glycine max
tctcgagccgaatcggcatgacatagccagcatcagcattcagtaacatcaatatcatcgacaacagacaacaatttcgggaatccgctggctatgactgcagttgtggtcgtcccattgggccttctcttcttcgcttccggcctcatcgttaacctcattcaggcaatatgctacgtggttgtgcggccggtgtcgaagaatctgtaccggcggatgaacagggtggtggcggagctgctctggctggagctcgtgtggattattgattggtgggccggtgttaaggttcaagtattcacagatcctgaaacctttcgttcaatgggtaaagagcatgctcttgttatctccaatcacagaagtgacattgattggcttgttggatgggttttagctcagcgttcaggttgccttggcagcactcttgctgtgatgaagaaatcttcaaagtttctaccggtcattggttggtcaatgtggttttctgaatatcttttcctggagagaagttgggccaaggatgaacgcacattaaagtcaggcctacagcaactgagggatttccctcttcccttttggttggctctctttgtagaaggaactcgctttacccaggccaaactattagctgctcaggagtatgcagcctcagctggattgcctgttccaagaaatgttttgattccaagaactaagggttttgtttcagcagtaaaccatatgcgctcgtttgttcctgccatttatgatgtaactgtggcaattcccaagagttcacctgctcctacaatgctaagactcttcagagggaaatcttcattggtgcatgtgcatattaagcggcatgcgatgaaggatttgccagaagaagatgaagctgttgctcaatggtgtcgagatgtgtttgtggctaaggatgcattgttagacaaacatatagctgaggacacattcagtgatcaagagctgcaggataccggtcgacccataaagtctctagtggttgtcatatcgtgggcatgtgtcgttgttatgggggtcgtaaagttcctccaatggtcatcactactatcctcctggaagggtgttgcattttcagcatttggtttgggagttgttactctactcatgcacatcttgatcatgttctcacaatctgagcgttcaacccctaccaaggttgcccctgcaaagtccaagaatagcgaacaactggaggctagggataacaaacaagactagatcacacacattacctgaatattctatacatagagaattcttctgaggtcgcatcctgaacttgatttgcatttatgtgattttgaaaaagaaaaaaattgcattaacgtgtgtttagggactcactaccccctttctttatttgtttgctttggaattgtacctcgtatgtgttcagtccttgtattatgtattatgcatatactattcattattttgaaattaattaggatgaatttgtatagactaatatataggaatgacatacaaaaatcctgcctaacttcgcagttttttttagagacttgtacactttctggtattggactattaattgtggttatttcttgctccccttct

SEQ ID NO: 8297 - DNA, 1608 bp, Glycine max
gagaaaatagacaaagttcagtgaagcactcaggatctgtgagcccaaggttgcaacagaagaagttggagttagagaagcggtctcgtccccctgccccaccatcagattccaacaaacccagaaggcaatctggtaagaaagccaccgacgcgggcccccccccccgaagacaaagacccaaatccctcaacgtaccgcatggtgatgagcaattgagtgagattagcaatgaaccaaggagtttaagtttccagggggatgaaatttctctgcaatcaaacagtttaactgtcaactcaaagatggatatggaagtcacaagtagtttacaaactgttgaaattgatgacagccaaagcccatctttgaaggctgtgaagcaattgatttcagagacagtgcagaaaaaatcaactccaaggttggatgaggaggagacagttgcagaacttgcaacagatgccccggaacatcctagtcctatctcagttcttgatggctcagtgtacagagatgacgtgccatccccagtaaagcagatatctgaagattcaaaaggtgaggatgctcaagaatccaaagaaaatgagattaaagatcagtggaaccctgaagatagcctttcatttaacagcactggacccctagagatcaatcgcaagaaattacagaacataaatcaccttgttcagaagcttcgacgactgaactccagtcacgatgaagctagaatcgattacatcgcttccctgtgtgaaaacacaaatccagaccacagatacatctccgaaatattattagcttcaggtctcttactcagagatctgagttccgagttgctgacatttcaacttcactcgtctgttcatcccattaaccccgagctattccttgtcttggaacagaccaaggcaagtagtctgctttcaaaagaagaaagcatcccaggaaaagacgctaattcgaagctgaacaaagagaaatttcacaggaaactcatctttgattctgtgaatgagattcttggcgcaaaattcagctcctcccccgagccatggattcaacctaacagtaacagactcaccaagaaaaccttgagtgctcaaaagcttcttaaagaactatgctttgagattgaaaagattcaagccaagaagacagaatgctccttagaagaggaagatgatggtctgaaaaatattctgtgtgaagatgttttgcatggctcagaaagttggacagattttcatggttacttacctggggttgttttggatgttgagagactgatatttaaggacttggtagatgaggttgtgattggtgaatcaacaggtttgcgagtcaagtcattggttaggcgcaggaagctatttggaaagtagtttgttcaattcttccctttttctcactgatattagatccatataaattttcttgtcatttgcttataaaaaaaatttcttgtgtcaaggcatataagtttgcttgttagagctttgattattaattttttttttttttgctaaggtgtaaagaaatttgagttaccatggatttgtggcatacataacaatacataaaaactaaaaattcctgttgtgg

SEQ ID NO: 8298 - DNA, 3308 bp, Glycine max
ctaacccactgttgtagttcatgtgactctttgcttctttcacgctcactactctctttctttaatttttgtcaacttccataggagacaggaaataaaaatctcaacttgcttgatattttcttcctttctatctttttgtcactttccacgtaaagggtctcagtctcacttatggtatcatttagcatcatatctcttgattcccttttgtggcttagcaataacactccttgaaatatcttcccatatgcttccacaccccgtttttcttttttcttattaatctcttgttttctctcgccccccgtcccccgattcttgttattgatagatagagagacagcattgcttgaagttggaagaggggagaaagatttggaaatggctgctaaagtagatgctaatggtggtggtggtaagggtggggtttctgcagtttctgccaaggttccagcagtggcacatccattggctgaaaagcctgatgaggttgcatccaatattagttaccatgctcagttcagtcctcatttttcccctttcaagtttgagctggaacaagcttactatgccactgcagagagtgttcgtgaccgtctgattcggcaatggaatgaaacgtaccttcattttcacaaagttgatcccaagcaaacttactacttatcgatggagttccttcaaggtcgagctttgaccaatgccattggaaatctgaatatccaagatgcatatgctaatgctttgcgcaaatttggacttgaacttgaagaaatagcagagcaggagaaggatgcagcactaggaaatggtggtcttggtaggcttgcttcttgctttctggattccatggcaacacttaatttgccttcttgggggtatgggtttgaggtatagatacgggctatttaagcagagaatcaccagggaaggtcaggaggaagtagcagaggactggctagagaagtttagcccctgggaagtagtgaggcatgacattttgtaccccatcagattctttggtcatgttgaggttaatcctgatggaagccgaaaatgggttggaggagaggttgtgcaagcactggcttatgatgtgccaattccaggttaccaaaccaagaacaccatcagtcttcgtctctgggaggcaaaagcgagtgctgaggatttcaatttatttttatttaatgatgggcaacatgatgctgcttcagtgcttcactcacgagctcaacagatttgtgcagttttatatcctggcgataccacagaaggtggaaaacttctacggttgaagcagcagttctttctctgcagtgcatcactccaagacataatatccagatttaaggagaggagacaagggccctggaactggtcagagtttccaacaaaggttgctgtacagttgaatgatacacacccaacacttgcaataccagagttgatgcgattactaatggatgatgaagggcttggatgggatgaagcatgggatgtgacatcaaagactattgcgtacactaatcatactgtcctccctgaagcactggagaaatggtctcaacctgtaatgtggaaactacttccacgccatatggaaatcatacaagaaatagacaagagattcactgcaatgataaatacaacccgattggaccttgagaatgagctttccgccatgcgcatcttggatgataatccccagaagccggtagttcggatggcaaatttgtgtgtggtttcttctcatgcggtgaatggtgttgctcagttacacagtgatatattaaagtcagaattatttgcaaattatgtttcaatatggccaacaaagttccaaaataaaaccaatgggataacacctcgaagatggctccaattttgcaaccctgagctaggcgggataatcaccaagtggttaaaaactgataaatgggtaaccaatcttgacttgttaacaggtcttcgacagtttgctgacaatgaagatctgcaagcagaatggctgtctgcaaagatggctagtaagcagcgcttggcacgatatgttttgcaggtgacaggggagagcattgacccagatactctatttgacattcaagtcaagcgtatccatgaatacaagaggcagctattaaacatccttggtgtgatttatagatacaagaagctaaaggagatgagccttgaagaacgtaaaaacactactccacgcacggtgatgattggaggaaaggcatttgcaacatacacaaatgctataaggatagtcaggttggtgaatgatgtcggtgctgttgtcaacagtgatcctgaggtcaacggctacttgaaggttgtgtttgtcccaaattacaatgtgtctgtggcagaggtgctgattccaggaagtgagctttctcagcatattagcactgcaggcatggaagcaagtggcacaagcaacatgaaatttgctttaaatgggtgccttataataggtaccttagatggagccaatgtggaaatcagggaggagattggtgaggataattttttcctttttggtgccacagcagaagatgtccctcgactgaggaaggaaagagagaatggactgttcaaacccgatcctcgatttgaagaggcaaagaagtttattaggagtggggtgtttggaagctatgactataatccattgcttgagtccttggaaggaaattctggttatggccgtggtgattactttctagttggtcatgactttccaagctacatggatactcaggcaaaagttgatgaagcataccgtgataggaaaagatggctaaaaatgtccatcctaagcactgcagggagtggaaaattcagcagtgaccggacaattgctcaatatgccaaggaaatttggaacatagaagagtgccgcgtgccataatttctgctggatgtgtgtctcttgcactcaagttactgtatatagcaccaacagaatgataagtaaaaagaagtgaataataaaaattaaaaataatttctgaaaagagaaagtgaaggagattttagctttctataatatttagcttgtcatataagatttcagctgtattcttatattaattgctttctcaaccatctgcttctgacagatagagctttctatatgcaaataaatctatagtttcatattctgttttttaattaatgtcaatttactcggccttccaaatttgagtattattttttcatctttgtaatgaactaatgtggtacatattatggttcagttgaataaaatcatgttctagaaaaaaaaaaaa

SEQ ID NO: 8299 - DNA, 1439 bp, Glycine max
gccaccactgctaacaacagagctccaaattcgcctctctctctctctctctctcttcgcttcctctttctcttgcacagaaaccaaaaaccgaacaagaccaaaaaaaaaaaaaaaaaccctaacccccctctcatggcttcttcactccttcaaccttcttcttcctcttctctcttcgccggcactctccgaaccttagattttgtagaccattcccgcgcccgaatctccgcgccttacaccgtgaaatgtgacatgtcggaatcgtcgaatttcgtcaatgggaaaccgatcattccggttctcaacgaaaggactctgcctaagttcatggaatccgcgagggaggcgaaggccgtcagcagaaatagtaacaggttgaaattgttctctggcacggccaatcccacactctcccaggaaattgctcggtacatgggcctggaacttggaaagatttccatcaagcgatttgctgatggtgaaatctatgtccagttacaagagagtgttagaggttgcaatgtttaccttatacagcctacctgtcctcctgcaaatgagaatctcatggagcttaaaataatgattgatgcttgtcggagagcatccgccaagaatatcactgctgtgattccctactttggatatgccagagctgatagaaagactcaaggacgtgaatcaattgctgctaaacttgttgcgaaccttattacaaaagctggggcagaccgtgttctcgcttgtgaccttcattcagggcagtccatgggttactttgatattcctgttgatcatgtacactgtcagcccgtgatccttgattatcttgccagcaagacaataagttcaagtgacttggtggttgtttcccctgatgttggtggtgtcgcaagagctcgtgcttttgcaaagaaattatctgatgcacccttagctattgtagacaaaaggcgccatggacacaatgttgctgaggtgatgaacctgattggtgatgtaaaaggaaaagttgctgtaatggtggatgatatgattgacactgctgggaccattgctaagggtgcagcactattacatgaggagggagctagggaagtgtatgcatgctgcactcatgccgttttcagtcctcccgcaattgagaggttgtccggtggcttgtttcatgaggtgattatcacaaacaccattccagttgcagagaagaactatttcccccagttaactattcttactgtagcaaacctattgggtgaaacgatttggcgtgttcatgatgacagttctgttagtagtatttttcagtaaacaatcccaatgaccttttgcagttaatttaatcaataaatgtttttttttttaaaaaaaaaaaaaaaattttttttgaaaaagccagattttttgggcaccccccccactttgggggaaaa

SEQ ID NO: 8300 - DNA, 781 bp, Glycine max
gctcccccggcccgccctcgcgcccagtagaagcctgaaaagcgtgagtgaggggtagtgatagaaggataaggtgaggtgacgataaaccgtggaaagtggaaacggtggtgtagtctgtgagtgtcattgtgaagttggagacaatgttagcttcttctctctccttcctccattcttgttcatcttcctctttcttattgtcaatttcacttcctaatcccaaaccctctcattccctacctttcgtgctcgaagccaaagacaggacccgtagggaagacaggtccgcgcgccacactcgcatcagaaagaaggtcgaagggacacccgagaggccgaggctgtccgtgttccggtcgaacaagcatctctctgtgcaggtgatagatgacaccaagatgcacacgctcgcttcgatttcgacaatgcagaagacggttgctgaagagttcaactactccgctggccctacacttgaagtagcaaagaggatgggtgagatcattgcgaagtcctgtttagagaaggggatcacaaaggtggcctttgatcgaggtggatacccataccatggccgtgttcaagcactcgctgaagcagctcgtgaacatggcctagatttctaaactgagtctctctcctttgtatctctttgtatttcatgtttaaatttataacccgaggcttcaacaatttttttaaatgacatttccttatttctaatgactttattgtgatccaattgctcctattcatctatcaatttctttttagttct

SEQ ID NO: 8301 - DNA, 1036 bp, Glycine max
gcgccctcgcgtccgacggctgcgagaagacgacagaaggggaccaacagttttgtgagtgaagcctttccagtgtgcagctgcatctgcagccggttcaatcattcaaaattgtcaagttgtttggtttggagcaatcatcattgtccaaattgcaattttttcagaaggatagcaagaatttgggaagttgctgaagcaatagggagtagtggatacggtttaggatcattgttataataggcaaaattgatggtaatcgtacatagtggctaggaagggatataatggctactgctgcagttattggactcagtggaggaaagaggctcttgagttcatcataccattactctgatgttatagaaaagctttcttatggcagtgattttggatccacacactatcaaattgttcctacaaagtctttaatagctgccaagaagtcatccaactacactccaacttttccagcatcgaaccagcagaatcagtccattaaggctcttaaggagcatgttgatgatgcccctaccattgcggatccatggtttcagagttacaactctaatgacttagaggtggaaagctctgaaatgggttattctgtggaggctcttcttttgctgcagaagtcaatgctggaaaagcaatggaacctttcctttgaaagggaagtgcttaccgaacattcgagtaagggaaaaaaatgtaggaaagtggcggtgacttgttctggggtgtctgcaaggcaaagaagaatgaataccaagaggaagaccgcgattaaaacttgtggtgctatgcagctgaagtccaaaatcagtccagagctgcttcaacaccgtttgaagggctatgtgaaaggcatagtgagtgaggaattgctctctcatgcagaagttgtaaacctatcagagagaataaaagttgggctttccttagaggagcataaatccaggctgttgcatatacggtggtgcctaccctctgatgatcaaatgcaacttctttgaagatttctcgaactgaacta

SEQ ID NO: 8302 - DNA, 2105 bp, Glycine max
cttcctttttttcttttaccaaattaacttcatcctcatccgattaatatcaaataaataaaaggagggaaaaagaaaaacaaaaaaaatctaatagttattttgcttccgcaccaacagttttgtgcttgaagcctttccagtgtgcagctgcagctggttcaatgattcaaaattgttaagttctttgttttggagcattcatcattgtccaaattgcaattttttcagaagaatagcaacaatttaggaagtttctgaagcaatagggagtagtggacacagtttaggatcattgttattataggagaatttgatggtaatcatacacagtggctaggaaaggatataatggctactgctgcagtaattggactcagtggaggaaagaggctcttgagttcatcataccattactctgatgttatagaaaagctatcttatggcagtgattttggatccacacactatcaaattgttcctacaaagtctttaatagctgccaagaagtcatccaactacactccaacttttccagcatcgaaccagcagaatcagtccattaaggctcttaaggagcatgttgatgatgcccctaccattgcggattcatggtttcagagttgcaactctaacgacttagaggtggaaagctctgaaatgggttattctgtggaggctcttcttttgctgcagaagtcaatgctggaaaagcaatggaacctttcttttgaaagggaagtgctaaccgaacattctagtaagggaaaaaaatgtaagaaagtggcggtgacttgttctggggtgtctgcaaggcaaagaagaatgaataccaagaggaagactgcgattaaaacttgtggtgctatgcagctgaagtccaaaatcagtccagagctgcttcaacaccgtttgaagggctatgtgaaaggcatagtgagtgaggaattgctctctcatgcagaagttgtaaacctatcagagagaataaaagttgggctttccttagaggagcataaatccagacttaaggaaagactaggatgtgaaccctctgatgatcaaatggcaatttcattgaagatttctcgaactgaactacgagcaagaatgatagagtgcactctggcaagagaaaagttggctatgagcaatgttcgcttagttatgtctattgctcaaaaatatgataacctgggtgcagaaatgggcgatcttgttcagggtggcttgattggactactgcgtggtattgaaaagtttgattcttcaaaagggtttaagatttcaacttatgtttattggtggatacgtcagggtgtttcaagagctttagttgagaactcaagaacattaagattgcctgctcatttgcatgagagattatctctaatccgcaatgcaaagtttagactagaagagagaggcattactccaactattgataggattgcaaaataccttaacatgtctcaaaagaaagtcagaaatgctactgaggcaatcagcaaaactatctcgcttgatagagaagcattcccctctctgaatggtatacaaggagaaactcatcatagttatattgcggatgatcgagtggagaacatcccatggaatggagtagacgagtgggcactaaaggatgaagtgaacagactcattaatgtgacccttgtggaacgagagagagaaattattcgactttattatggactggaaaaagaatgtcttacgtgggaagacataagcaaacggataggtttgtcaagagaaagagtaaggcaagttggacttgttgcattggagaaactaaaacatgctgcgaggaagagacaaatggaagccatgctattgaaacattaaatttggactcatcatagaaatatgttacaatgtatatatacagagaggaagtatgtacctagaaatttgacttcccgattcaaaaagaggacaatcatataagggaacattgaagatttgtaaatccctttaaatatggtgttagtaccaataaatatgggtaatttttgttttaacactccaaaaataaaaaaattacttttaaaaaaaaaaaaaaaaaaaaaaaaaaaaaaaaaaaaaaa

SEQ ID NO: 8303 - DNA, 1146 bp, Glycine max
  misc_feature (1134)..(1134): n is a, c, g, or t
  misc_feature (1138)..(1138): n is a, c, g, or t
ttggtttagaataatgggtccctccgtgttcttagttagatgtcgtgtttgggacaagaaaaagagaaatgaggtgcattcctaccactacatgcgtttggaacgctgaattaattttcgcctaaaaagacaattcggtgggatctaggttagcagcaaccagcgcaatctgggacttttctttctttctccccacacccagattcaaaaactcagctctgctctttcgtttggatctcaaaacatgttcttcttcgattggttctatggcattctagcttccctcggtctctggcagaaagaagccaaaattctcttcctcggtctcgataatgcagggaagaccaccctccttcacatgctcaaagacgagagattagttcagcaccagccgacccaacaccccacttcggaggaattgagcattgggaagatcaagtttaaggcttttgatttggggggccatcaagttgcccgcagagtctggaaagactattacgcaaaggtggatgcagtagtttacctggttgatgcctttgacaaagagaggtttgcagaatcaaagaaggagcttgatgccttactttcagatgaatcattggcaaatgttccatttcttgtgctaggcaacaagattgacattccatatgctgcatcagaagaagagctacgttatcatctaggcctgaccaatttcaccacagggaaggggaaggtcaacatcacggagtcgaaccttcggccactagaagtgttcatgtgcagcattgtccgcaagatgggatatggagatggcttccagtgggtctctcaatatattaagtagattctggcatcatttcccacctttccttgatctactagcactgtctgcagttacatcagaagagattttatctttgtttttgcttttgatgatttcattttgattgaattatttaatacaactgcagtgatgttatgttatgtgtcacagtttgtatctttagatattttctcttgtggggtggggtatattttctgtttgaaacactggattctgttgtaggggttatgtatgactggggagaaacacataataattctggaaaagttttatttcactttcttcccggccaaaaaaaataaaagaantagntaaagaaa

SEQ ID NO: 8304 - DNA, 1463 bp, Glycine max
tcgagtcagctacgtaggccccccccccccaacctcaattttcctcaataaacaatcaccttcactttttttctctcctcttcatttctgaactcatccccatggatccctttgatttgatacgcgaagcttcaagttgatggtggttccaatcagaatctgaattcaaagactctgtctgctcccaatctcagtgcaatggactaccctgcacttacttcaccagatggccagactgcttcagtagaatatgtggttgataatgtgcaacaaagtggcaatccttaccgatcatatgacagtgatgtgctgcttttcaaatctgtctcttcagtttcatctaggggtggtgctattgactttgcttcagctgttaggaagttggcttctcgggattctggtggtatttggaagtatgataaaaatggctctggtgatgctgctatcggctcaagtaggaattcaaatgttctggctagtggttacaatggtggacaggggagagcacactttggtgatcggttacagaaccgtggttcagctcgggcatttcctgtttggcttgaaactggtgatgcagttgcaaatatgtattcagagctgcgggaagaggctcgtgatcatgcatgcttacgtaatgcatattttgagcaggcacagcaagcctatcttattggtaataaagccctagcaaaggaactaagtgctaaagggcaactgcacaacatgcatatgaaggttgctcatggaaaagctcaagaatccatttacctccagagaaatccagttgctccagagttgcagggcgatggaagaggaaatgagaggataatagacctacacgggttgcacgcaagtgaagccattcatgtgctgaaacatgagttgagtgtgctgaaaagcactgccatagctgccgagcagcgtctgcaggtttatattcttgtgggcacaggtcatcataccaggggttctcgcactcctgcaagacttccaatagctgtacagcgttttcttcttgaagagggcattgacttcacggaaactcagccaggcctacttcgtgttgtgatatattgaacttgccaaggatgtgttttttgacacagtataaagtccaccaacactgggatattttactcatcgatgtatctgtatatgcccgaagaacaggaaaagaaaagaagaaaaaatcagttaggggagaaggaaagataaggttttgtagcagaattgtatcattaaggtttaggggcggcatcagatttacatttagtaagcaggatttctcatctgcccatgttatgggatcattttccttctgttaattttgtaccctaattttcatttttttgattcagatgtaattgatagaactcaattacgccatagaacaattgattttgcaaattagattcaatgtcaaacaatttatatctcacaacaaaaaaaaaaaaaaaaaa

SEQ ID NO: 8305 - DNA, 1306 bp, Glycine max
ccggggatcctctagagtcgacctgcagaagtcttctcataacatcaagtacagtagtcttacgaattaaattagcctgcaaggaaataacatcaaaattttcaagtgttaaaagaaaaatacatttttgagcaatgtgtgcatatagcaatcagattacagaagtttaaaatggggggggaagaaagagagatgaattcataatttccctgctgataccttccagttcaacaatttaccaacagaaatcttcacaagtgaagacacaaatttatggaaaagcttcgatgctccaaaatcattcttttaggaaaaaaatgacatagtgatctcacctgacgttctacagtcaaaggcgtatatcctgtcattagaaaatggcatcttggtgttggaatcaaagaggcaagaagaccaaccaagtcattattcatgtaccctggataacgaagagttgttgtgctggcagacataactgtagaaactaaggaatttgtttgagcaaatgatggatttgataaatgaagccgttccacagcaattctatttagtgcagtattgtcaagaactacaacacaatctgcattaagtgtcaatctcttgagtgttaaaagtgaattgtatggttggaccaccacatcactagtctccatttggttaggaaacacactgtatgtctgaaccagttttttgctgtagcggtcattcagagtctccaacaagtatgagcccatacctgagcctgttcctcctgcaattgaatgacatagaacaaaaccctcaagactgtcactgccatctgcttctctgtcaatcatgtccattatttcttcttcaacatgttgtccctgatcgtatccactggcccaattgtttccagcaccacctccgtgatctgagacaaagatgttctcatgattgtagagatttcggtagtcactattttgaattccattaatcactcttggctccaagtcaatcaggagagcccgtggtatataatgctggtcatcagcttggtagaagaacacgtctttacggtcacccccctgagtggcgaagtcttcgaggatgccttctttgctgatgccgtgttcgaggcagagctgcttccagaactccatgccgatctgattcccacattggccaacctggagagtgatgatttccctcggcatttttccagcgctagctagggtttggtggcggggaagaccctttttcaaaaaacaaaaaacaaaaaacaaaaatgaaaacgatgccttagttcgttcccccttctgtcgtcttctcgcagccgtcagaa

SEQ ID NO: 8306 - DNA, 815 bp, Glycine max
  misc_feature (6)..(6): n is a, c, g, or t
  misc_feature (15)..(15): n is a, c, g, or t
  misc_feature (18)..(18): n is a, c, g, or t
  misc_feature (22)..(22): n is a, c, g, or t
  misc_feature (60)..(60): n is a, c, g, or t
  misc_feature (65)..(65): n is a, c, g, or t
attccntccatagcnaanaggnacaaagaccactgaatgcataaagaaaccataacaagntcacncctattggatctattgcgcaacaccttgttgttcttcaaggttcttaatatgcgccttgagaaccgtaacaagttccctagcaggagactgaagagtgccaacaagagcggaagcagggctcttcaaagcccccaaaagggtggcgtaaatctcagcgcgcgtgggcaaggattcgaggttcttaacctcatcggggccgtaaaacttgccttcgaaaacggcgccggtgaagtcgttgtcctcgagcttcttctccttctggaagttcctgtagggcttgatggcggaagggatctcctcggtgtggacgaagagccacacgttcatgcccttcatgcagggcttcagcgtctcccagggcgtgccttccacggccttgtaaacgagcgtgttcttcgccacgatcagtttcgttgtttctgggagcgtctttcgaagctcctggaactgcttcaccgtgaagcccttgtagttgatgccggcgaggaggtaacagttctcgagctgctcccgcacagtctccaccgttgcctctttctttgtgcggggaattgcggcgcggatggtggggaggcgcggcggggggcggtgggctgggctgcgggagggaatggtgaatggattggtgggccgggtcaggagttgggcttgggcttgggcttttgttgagggaagggcgaagctcattgcggaggccgtggcttccatggtcggaattaggggaaagagagagtaaagatggatgaaag

SEQ ID NO: 8307 - DNA, 3369 bp, Glycine max
ccacgcgtccggaagaacaaccgctaactgtggttgcactaaaatatactcactctttttctctgtctccattcgtttctctccgctttaacgttgccccagttaagttttcttatgtaaaggcacaccctttacctaattactagtaccaacaccaaacaaccttgcctttttattctctccttcttgtgttacctttgttgtgtagtgagtgagtgaaagcatggctatggttgtggctcaacacagagaaagtagcagcagtggaagcattgacaagcacttagattctggtaagtatgtgaggtatactgctgagcaagttgaggctcttgaaagggtctatgccgagtgccctaagcctagttctctgcggaggcaacaattgatcagagagtgccccattctctccaacatcgagcctaagcaaatcaaggtttggttccagaaccgtaggtgtagggagaagcaaagaaaagaggcatctaggcttcagaccgtgaaccgcaaactcactgcaatgaacaagttgttgatggaggagaatgatcggttgcagaagcaggtgtcacagcttgtttgtgagaatggttttatgaggcagcaattgcatactccatcggcaacaactactgatgctagttgtgattcggtggttaccactcctcagcataccctgagagatgctagtaaccctgctggactcctatcaattgcagaggaaactttgacagagttcctttcaaaggctacaggaactgctgtagattgggtccagatgcctgggatgaagcctggtccggattcggttgggatctttgccatttcacaaagttgcagtggagtggcagctcgagcctgtggtcttgttagtttagaacctacaaagattgcagagatccttaaagatcgtccatcttggttccgtgactgtcggagcctagaagtttttactatgtttcctgctggaaatggaggaaccattgaacttgtttacacacagacatatgctccaacaacactggctcctgctcgggatttctggactctgagatataccacaagtttggaaaatggcagtcttgtggtttgtgagaggtccctgtctggttctggaactggccctaatccagctgctgctgctcagtttgtaagggctgaaacactccctagtggctacttgatccgaccatgtgaaggtggagggtcaatcattcacatagtagaccacctaaatctcgaggcatggagtgtgccagaagtgttgcggccactttatgaatcatccaaggtggttgctcagaaaatgacaattgcagcgcttcgctatatcaggcaaatagctcaggaaacaagtggtgaggttgtttatggattgggtaggcagcctgctgttctgcggactttcagccagagattgagcagaggcttcaatgacgctgtaaatggattcaatgatgatgggtggactgtattgaactgtgatggtgctgaggatgtatttattgctgttaattcaaccaagaatttgagtggcacttctaacccagcaagttcccttacattccttggaggaattctctgtgcaaaagcttctatgttgcttcaaaatgtccctcctgcagttttggttcgttttctgagggagcaccgctcagagtgggctgatttcagtgttgatgcttattctgctgcatcactgaaagccggcacctatgcctatccagggatgaggcctacaagatttactggcagtcaaataattatgcctcttggtcatacaattgaacatgaagagatgctggaagttattaggctggaaggtcactctcttgctcaagaagacgcttttgtttctagggacattcatctcttacagatatgtagtgggattgatgagaatgctgtgggggcttgttcagagctcgtatttgctccaattgatgaaatgttccctgatgatgctccattggttccttctggtttccgcattatcccattagattcaaaaccaggtgacaaaaaggatgctgttgctacaaatcggaccctggatttgacatctggttttgaagttggtcctgcaacaactgctggtgcagatgcatcatcaagtcaaaacactcgatcggtgttgactattgccttccagttcccttttgacagcagtctgcaagacaacgtcgcggtcatggcacgccaatatgtccgcagtgtgatttcctccgtgcagagggttgccatggctatatctccatctggtataaacccatcaattggagctaaactttctcctggttctccagaggctgttacactagctcactggatctgccaaagttatagttactatttagggtccgacttactgagatcagattctcttgttggtgacatgatgctgaaacaactgtggcatcaccaggatgccattctatgctgttcactgaagtcattgccagtgttcatatttgcaaatcaagctggccttgacatgttggaaacaaccctagttgccttacaagatatcacattggataaaatatttgatgaggctggacgcaaggcattgtgtacagactttgccaagttaatggagcagggttttgcttatctgccagctggaatctgcatgtcgacgatggggcgccatgtgtcatatgaccaagccattgcatggaaagttcttactggggaagacaacactgttcactgcttggctttctctttcataaattggtcatttgtatgaaaaatccaattcgtgtgccctgctttttcccacttgaacataaaaatgaaagggttaaaagggagacaagacaagtttggggggaaaaagaagtcgtaaatttttgtataacacatcaggatcaggtttgcatttaattcgatttaatttatttcttatttagtgcagagaccaaattgaattaatcttgtaaattatttagtgctagagtgaagttgagacttttgaatgacacatgttgagtactttgtttttgtctctactatctttccctcgaccttaagctcatacacagaagaacttgtgtgatgacaaagcgcgtttgtaatgtttattcttacacaatcacagttctgacttgtgtgtccaacgtagtactatatattcttactggagtactttgtctttcaactcgagttaagcattagggtacatttgtatctgaagtactatgcatttgtacaacctatctgtattttaagattgctaaagttataaactgaagtgttaaatcaattacacatcactaacgatggtggtaacgtatgtgaaatagaaagagaataaatggaaaatagttacacagaccttttataaaaaaaaaaaaaaaaaactcg

SEQ ID NO: 8308 - DNA, 1821 bp, Glycine max
  misc_feature (1520)..(1541): n is a, c, g, or t
  misc_feature (1628)..(1634): n is a, c, g, or t
tcagctacgtaggccccccccccaattgccatcaatgggcttggccttgtgaatcctgagaaagtttttcatccctccctcccgctccactcatatttggcatctgctggtattgatggtgtcaaagttgatgttcagaatatccttgaaactcttggagcaggacatggtgggagggtgaaacttgcaaggaaataccaccaggcattggaggcatcaatcgctaggaacttccctgacaatggaatcatttgttgcatgagtcacaacactgatggattatacagcgcaaagcgttcagctgttattagggcatcagatgatttctggccaagagaccctgcatcccacacgattcacattgcatcagtggcttacaatactattttccttggtgaatttatgcagccagactgggatatgtttcatagcctacatccgatggctgaatatcatggtgcagcacgagctgtagggggatgtccaatttatgtcagtgacaagcccggacaccatgactttgatcttttgaagaagcttgcactacctgatggttctatattaagggctaaacttccaggacgaccaacaaaggattgcttatttactgatcctgccagagatggaaagagtcttctgaagatttggaacatgaatgatttttctggagttgttgcggtattcaattgccaaggagctgggtggtgcaaagttgacaagaagaaccttatccacgatgagaatccgggcactgtcacaggtttcgttagagctaaagatgttgactatttatccaggatagtagatgataaatggacaggagatgccattatttattcccaccttggtggagaagtggtttaccttccaaaggatgcatccatcccagttaccttgaaaaccagagaatatgaagttttcacaatagttcctgtgaaggaattgagcaatggtgtcaaattttctcctattggtttaataaagatgttcaattcaggaggggctgtcaaagagtttagttggggatctaatgaaagtacaaatgtagccgtaaaagttcccggttgtggccaatttggtgcttattcatcagctcggcctaagttgataacagttgatttagaagaggtagaattcaagtatgaggaagaatctggattggtgactattgatttgagagtacccgagaaagagttataccaatggagcatttctattgatttttgaatcaaatactttgtctctagatgaaggggtttatggttatggacttgatagtgtgtattcatagttcgtaacaatatgatgagtgtatgtagaccaatagcaggaaatgttagaagttccctgtaaggaataaccagaagcaatgaatacatagtactaagttctctacgtatttcttgtgatatacttgagcagaatgtaaatgcagtcttcggatcgttccccatacagtatgaattggttgctcttagtttcattatgcctcatttctacaaagttcattgtagtttcgnnnnnnnnnnnnnnnnnnnnnnagatagaaatgcattctgattagcccgcatatccttcaaatggagaactgattgatttgataaattcaaatattacatgtcttcaannnnnnnatgctccactgcaaatattactcaaggcgtttctgcaagtatggaactcctatgctgatatgctctcatggaaagcagttactgagaaacccacattgagagcaggtccttgttggattggtctaggactctgaatgaatcctcttaatccaacaagtacttcagaacaaacctgaggactctgcag

SEQ ID NO: 8309 - DNA, 1189 bp, Glycine max
  misc_feature (16)..(16): n is a, c, g, or t
  misc_feature (21)..(22): n is a, c, g, or t
  misc_feature (32)..(32): n is a, c, g, or t
tgcaggtaccccggtnccggnnaattcccggngtcgacccacgcgtccgcggacgcgtgggcggacgcgtgggttgcatcagtggcttacaatactattttccttggtgaatttatgcagccagactgggatatgtttcatagcctacatccgatggctgaatatcatggtgcagcacgagctgtagggggatgtccaatttatgtcagtgacaagcccggacaccatgactttgatcttttgaagaagcttgcactacctgatggttctatattaagggctaaacttccaggacgaccaacaaaggattgcttatttactgatcctgccagagatggaaagagtcttctgaagatttggaacatgaatgatttttctggagttgttgcggtattcaattgccaaggagctgggtggtgcaaagttggcaagaagaaccttatccacgatgataatccaggcgttgtcacaggtgtcattagggctaaagatgttgactatttatccagggtagcagatgataaatggacaggagatgccattatttattcccatcttggtggagaagtggtttaccttccaaaggatgcatccatcccagttaccttgaaaaccagagaatatgaagttttcacaatagttcccgtgaaggaattgagcaatggtgtcgaatttgctcctattggtttaataaagatgttcaattcaggaggggctgtcaaagagtttaattggggatctaatgaaagtacaaatgtagccatgaaagtccgtggttgtggccaatttggtgcttattcatcagctcagcctaagttgataacagttgactcagaagaggtagaattcaagtatgaggaagaatctggattggtgactattgatttgagagtacctgagaaagagttataccaatggagcatttctattgatttttgaatcagagactttgtctcaagatgaaggggtttagagttatagacttgatgtatccatagttcgcaacaatatgatgagcgtatgtagaccaatggcaggaaatgttagaggttccctgtaaggaataaccagaagcaatgaatgaatatcacgaagttctctacctattttttgtgatatacttaagcagaatgtaaatgcagcctttgcatcgttcccatacagtatgaattggttgctcttggtttcc

SEQ ID NO: 8310 - DNA, 970 bp, Glycine max
ggtccggaatacccccggcgtttgatttggaacaaacaacaatagaggggttgtggtgctctgtgtgctgcaatttccttttgagcttgtgtttgattcatcaaatcatcaaagatgactgtaggggcaggaatatctgttgcagatgggaacttgatggtgttggggaacaaagtgctgagccatgtccatgacaaggttcttgttacccctgcatgtggtggtgctttgctcaatggggcattcattggggttcaatcccatcacaagggtagccgcacagtcttcccaattggcaagcttcaggggttgcgatttatgtgtgttttccggttcaagatgtggtggatgacgcagagaatgggcacttgtggacaagatatccccattgagacgcagttcttgctcgttgaagcacacaatggctctgatattgaaggaggaggagaccaaggtgctgctacctatgcagttttcttaccccttctcgaaggagatttcagagcagttcttcaggggaatgatcaagacgagattgaaatctgtgtggaaagtggttgtcctgctgtggaggaatttgatgggactcatttggtttatattggggctggatccgatccttttgaagtcataacaaattctgtcaagactgttgagaaacacttacagacctttgcacatcgcgagcgaaagaagatgccagatatgttgaactggtttggatggtgtacatgggatgctttctacactaatgtcacttcagagaatgtgaagcaaggattgcagagctttgagaaaggtggaattcctgctaagtttgtataattgatgatggatggcaatctgttgggatggaccccaatggtgttgaatggaaatctgatagttcagccaactttgcaaatcgcttaactaacatcaaagagagaatcacaaattccagaaagatggcaaagaaggtcaacgggta

SEQ ID NO: 8311 - DNA, 2048 bp, Glycine max
  misc_feature (68)..(68): n is a, c, g, or t
cccaacctcccaactccaacaccctctctctctctctctcgtcttcaccaaacaaacaaactccactncatcgcgtgaagacgacgacgatggagatgctacgcagaagcagcagaagaatcttcgtctccgcgtgtgtgtggttgcttctgtcgctgtcaccgtcaccgcccagtgttgttaacgcctcccatggcgtattcaacgtgaagtgcaagtaccaggccaccgctcccgcccccccctcaaagcccacgactaccgccgccagctctccctcctctccggcgtcgacctccccctcggaggctccggccgccccgacgccgtcgggctttattacgctaaaattgggattggaactcctccgaagaattactatttgcaggtggacactggcagtgacattatgtgggtgaattgcattcagtgcaaagaatgccccaccagaagcaaccttggtatggaccttacactctacgacataaaggaatcctcctctggtaaatttgttccctgtgatcaagagttttgcaaagagatcaatgggggtctgctgaccggatgcactgctaatatttcctgtccatatctggagatatatggtgatgggagctcgactgctggttactttgtaaaggatatcgtactttatgatcaagtgtctggggaccttaaaactgattcagcaaatggaagtattgtatttgggtgtggtgcaagacaatctggagatctaagttcttcgaatgaagaggcacttggtggaatacttggatttggaaaagctaattcatcaatgatttcacaacttgcttcttctggcaaagtgaaaaagatgtttgctcattgcttaaatggagtaaatggaggtggtatatttgctattgggcatgttgtgcaacctaaagtaaacatgactccattattaccagaccagccacactacagtgtcaatatgactgcagttcaagttggccatgctttccttagtctatcaacagatacatcaacacaaggagacagaaaagggacaataattgacagtggtacaaccctggcctatctgcctgaaggaatttatgagccgctagtatataagataatttctcagcaccccgatctaaaagttcggactctccatgacgagtatacgtgctttcaatattccgagagtgttgatgatggatttccagctgtcacattttattttgaaaatgggctctcgttgaaggtttatccacatgattatttatttccccccggagattccgcctgtcggccggggcaaaatagtgggacacaatcaagagatagcaaaaatatgactttattgggagatttagtgctttcaaataaacttgtcttctatgaccttgaaaatcaggctattggatgggctgagtacaactgttcttcaagcattaaggtgagggatgagcgaactggaacagtccatttagttggttcccactacatttcttttgcttgcgtttttaacatcaactgggtggtgattttgtctctacttgctctacttcataaattgatttattgaaatggagcaacagatacatataccaaagtcaaaattatggtcaaagaaagaagataaaaaatgctatgtgagaaattgactttttaggaacttccatgatttctaaatgtaatcaagggaaaactaggacactgaccattgggaaccttcgccgtgggtaaaatttttcttctcaattaccaaggtgaatatgtaaattgcaaaatcttaccaccaactgtatatgttactagactttgattttttacttagcttgggtctgaatgccaaatgtataattaacatgatacaagtcatgtttggaattcaaggcagtgttgcaaatatttaacattaggtattgtagagcatttctgtgctggctggctccctttgtttgacctattttagccagtgttataatattccttacaacaaattcttatataacatttttaacaattcatttttttttctttatctctttcgaatgcattacctatgttatttc

SEQ ID NO: 8312 - DNA, 872 bp, Glycine max
  misc_feature (9)..(9): n is a, c, g, or t
ccagggganttcggccattacggccggggggagaaaaaagaagaaatgtcaagaatggcaatgcgtgtgtctccttcagcttcaagtgcactctctctcctaaactgcaagcaaccacctccagtttcatgcatccgtgtaccttgtctctctcgctcctcgccgccatcgctctcctacaccttcaatcctcttaggtccttcatcggtcacggcggaagcagaagcccagggtttcgtgtccattgctacgctcctgctcctctcactcctcccaatctgcaatggatctctaccatttcctcagtggttttgatactggcgagaggcaccgcggtgccgaaatcgtatattgttccgttgtttgctctgcaagcacctgcaggtgtcgtttcctggatcaaaggtagatatggtgtgtggacagcattcttggcacttctgattcgtctattcttctatattcctggtgaacttgagttgccatttctggcattgctcttgctgatggtagctccctacgaggctatgaaattaaggtatacaaaagaaggtgctgtgatttcattattaatctcggtgtatctggctttccagcatttctcaagaacaagcttacaacaatcatttgaccaaggttcaattgttgccaccttagctgtcatttgtatcactgttgtatctttgttgcttctaatctgagttggctttgaaatgatgtacacagtacactaattgtaaataagaataatagttgttggagtgatgatattaaaaagttatgggttatgttggatactcagtcttgtacttttcacttgttaattcaaataatgaagttggaatcagtaaaaaaaaaaaaaaaaaactcg

SEQ ID NO: 8313 - DNA, 1544 bp, Glycine max
gcaccaggtcattataagtagtatctaggccacttatgtaggtgtttggcccggctcttttttcctttttcttctccttaaaaggagaaattgagccaaacacatttagagaaaaactcttaatatttgaggaccatttaataaatgaaaagggagaaaattaacatttaaaaaaaccctaactaaagtagctttttaatctgcgccgcaggcccccccctcctccttttcttcctgaactagttgaaacaaatcttttatcttaaaaggagtttttaagctaagactaccaaacaacttctactttaattttaaagtttttattttagctttaactttaatgtagcttttaagcaaaaaataagctgggtcaaacatagccttagctatgagatcttaataatagaatctctcttctattcagatattggtttacaaaaatccatattttgagaaaatatgacatttgaaaatgtggttttttaggccacactacagtgttaatatgactgcagttcaagttggccatgctttccttagtctatcaacagatacatcaacacaaggagacagaaaagggacaataattgacagtggtacaaccttggcctatctgcctgaaggaatttatgagccgctagtatataagataatttctcagcaccccgatctaaaagttcggactctccatgacgagtatacgtgctttcaatattccgagagtgttgatgatggatttccagctgtcacattttattttgaaaatgggctctcgttgaaggtttatcctcatgattatttatttccctctggagatttctggtgtattggttggcaaaatagtgggacacagtcaagagatagcaaaaatatgaccttattgggagatttagtgctttcaaataaacttgtcttctatgaccttgaaaatcaggttattggatggactgagtacaactgttcttcaagcattaaagtgagggatgagcgaacgggaacagtccatttagttggtttccactacatttcttttgcttgtggtttaaacatcaactgggtgatgattttgtctctacttgctctacttcataaatgggtatattgaaatgaagcaacaaatacatataccaaagtcaaaattatggtcaaaggatttgaaaatagaaagaacatgaaaaaaatgctgtgagaaattgacttttcaggaacttccatgatttataaatgtaatcttcaaggaaaactaggacactgaccattgggaaacttcgctgtgggtaaaatttttcttctcaattcccatcatggtgaatatgtaaattgcaaaatcttaccaccaattgtatatgttattagactttgatttttgacttagcttggatctcaatgccaaatgtataattaacatatacaagtcacgcacggaattgaagttatagttgcaaatatttaacagtagttattgtagagcatttctgtgctggttgactccattatttgacctatttttagcgagagttataatattgttacgacaagttctt

SEQ ID NO: 8314 - DNA, 1230 bp, Glycine max
tacttccgtgttgaatacattgatctgtattatcagtacagagtggacacatctgtacctatagaggaaacagtgggtgaacttaagaaattggtcgaagagggtaaagtcaaatatattggattatctgaagccagcccagatacaataaggagagcacacgcaattcatcccatcacagctgtgcaaatagagtggtctttgtggactcgtgacattgaagaagagatagtccctctctgcagggaacttggtattggaattgtaccatatagtcctcttggtcgtggcttttttggcggcaaaggagttgtggaaaatgtgcctacaaatagctccctgaaagcacatccacgctttcaagccgagaacttagacaagaacaagaatatatatgaacgaattgaaggccttgctaagaagcatcaggccactcctgcccagttggcattagcatgggtacttcagcaaggcgaggatgttgtacctatccctggaacaactaagattaagaacctggatcaaaacataggtgccttagcagtgaaactgtcagaaaaagacctgagagaaatttctgaggcggttcccattggtgatgtagcaggtggtagatactacaatggattggatcacttttcatggaagtatgctaacacacctccaaaagattcaaaaatctcaacctgacgcacccaaccaaccctttggttagggaatctaccaagtcatcatgaattgagggtaacaaggctggcaaaggctaatatcaggatgctatttaaatatcaataatgtagcccttcttgatgttggacttcctagatatttggttggttaaaatttttaatttagactgtaatactattttatatgcaacagataattatgagcagtttcgaaggcatgacttgagtttaggatgggtcaaacatggtttttgcattcaccaagatgtttgaatctgcgttagaaacatgattttaaattatggactcaagtctcattgaagtatttggaatcagtttttgcatcacccttgacttgagtcattaatttgttccaagtataattctgtttaatattgatattggcatgataaatagcaagaaaaaacatatttttttagttgaaaaaaaaaaaaaaaaaaaaaaaaaaaaaaaaaaaaaaaaaaaaaaaaaaaaaaaaaaaaaaggaagagggggggaaaaaaaaaaggggggaagcgcc

SEQ ID NO: 8315 - DNA, 1401 bp, Glycine max
gtaccgtgccgggccccccctcgagtcaggtacgtaggcccccccccccccatttttattattgtcaatctgaacaaattattatacacagtatagtttagccctgtacttttgtgctctgatcaaataagtgaagaacttggtgtagtataatcgtgcattccttgttttaaagagttgagagcttcttcttatgtactaaggttactgactgaaggtcttctcaattaataactgttcagagcgaattgtaaatcttgccagacaaatctctacttcgtttctgaagtgtttagttttgataaagttcaataggaggaagatctattaatgttcaaaaatatttttgatttcttttgttctatatccaatctccctgaagtctttaaaaccaaggctttaacttgtatcgtgccattgataaataattaaatattgaggagtacatgaagtatatcgagaagtttgaactattaagtatgtccaaagcattttgagatttctttttcgcctttattacttttctcctcctcctcagtcctgaagcacaaatatgttctatatttatctcttttggtgcataagtgtatgattatttcctcaatttctttggaccttcacaggaacaactaagattaagaacctggatcaaaacataggtgccttagcagtgaaactgtcagaaaaagacctgagagaaatttctgaggcggttcccattggtgatgtagcaggtggtagatactacaatggattggatcacttttcatggaagtatgctaacacacctccaaaagattcaaaaatctcaacctgacgcacccaaccaaccctttggttagggaatctaccaagtcatcatgaattgagggtagcaaggctggcaaaggctaatatcaggatgctatttaaatatcaataatgtagcccttcttgatgttggacttcctagatatttggttggttaaaatttttaatttagactgtaatacttttttatatgcaacagataattatgagcagtttcgaaggcaaaaaataagaaaaaaaaaaataaaaaaaaaaccaacacacaaaaaatgaaaaaacaaaaaaaagggataggttttcctgccccccgggggaacccactatttctaagcggcccgccaccccgaggaaccccccctttttgttccttttagggggggtaattttcgagttgggggaaaccgggcccaaaactggtttccggggggaaattttttcccttccaattccaccacaaataagagcggaaaacaaaaaggtaaagcccgggggggcctaaggaggggctaactccattaatggcgttgggtccccgtcccgtttccaggcgggaaaccttgtgcgccgttgttttatgaatccgccaagcgg

SEQ ID NO: 8316 - DNA, 1268 bp, Glycine max
cgaaggagcatgacctcgccacgcgccttcgcgtgacagatgccctcccgccgaatcggctcgagcactccatcaccacaaccccaatcttcttttctctctcctctgccctaattcccattttcccaacttcaatttcattctcaaatattcctattccaattccaatcctattcctttcgattcctcttcccccagtttggaaattttgttgctggaagaattgcttaagggcatataactggctttattcacatgggatcagagagtgcggctccaatggttgagacatcaaaaaacagatcttcttctgataaaatgaaccaagggaaagtccccaggaaaattcacaaggctgaaagggagaaaatgaagcgtgagcatttgaacgatctctttcttgatcttgccagtgcacttgatctaaatgagaacaatggaaaggcttctatactgtgtgaaactgccaggttgctaaaagacttgctcagtcagatcgagtccctcaagaaagagaatgtcactctgttgtctgaatctaattatatgaccatggagaaaaatgagctgaaggaggagaattgtagcctagaaacccaaattgagaaatttcaaggtcagatacaggcaagactggctcaatgtaaacctgacctgaatgtacctccccatttggaacttgagccactggagcagacaaattttcctggacagaatctccaattgcataccatagaacctaacttgcagcaaggatctgcgattttggttgtcccctgtaatcctgatcttccaccttcttttccagctcctaatgttaccggggtcatgccgaaatctacatctgttgtcagtaaaccacatgccaggtatcccacacccgcagattcatggccatcacaactgcttggaaagcaaccaacttcaagttgatttgtattttctagagttttagtttcagtattggtttaacatgccaactagctttcccgatagcaaagcctctttggagctttcatgtataaattatatttattcaatgatctaagagagtctcactctcttctgtttcgccttatctaggtattcattttgggttcgagttagtacttagtacattctcctttactttgttttctcaggccttaaagccattagttacttgtagaaatgtttttgcggtgcttttccatggcaccatatccgatgtttacttggcacttagtttttaagaaactttttattcggcaccaaaaaaaaaaaaaaaa

SEQ ID NO: 8317 - DNA, 1683 bp, Glycine max
  misc_feature (1376)..(1376): n is a, c, g, or t
  misc_feature (1389)..(1389): n is a, c, g, or t
  misc_feature (1438)..(1439): n is a, c, g, or t
  misc_feature (1481)..(1481): n is a, c, g, or t
cggtccggattcccgggtcgacccacgcgtccggttttggccttttcatctctctctttctctctcttctgtgtttccgccgctgcataagcaaagtagcagtgactcagtcacttgcaacattttcggcttaacatatcagacccattgaaccatcactcttttctgttcctgctcatgtatctcatcatgccccctattccaatctagagttttaatcttttcaagtttcaacctttgttcctatgtagacaccccacttagtatatcatagccataataattatatcatatcttaatcatattaatcatttcacaatcataaccaaaccatgggttgcttacactccaaaaccgcacatcttcactcccctgaagaccctcctactgccttaccagactccaaaaaacccgatccagggaatggtggtgatgatgttgatcaagagtgtcaggttccagcattcaaagagtatggcctgattgagcttagaagggccacaaatgagttcagcacagattacattgtttctgagagtggtgagaaagctcccaatgtggtctacagagggaagcttgagaacaatcggttagttgctgtgaaacgcttctccaaactctcttggcctgatgctcaacagttcatggcagaggcagctggagttgggaaagtgaggcacaagagaatggtgaatctaattggttgttgtgctgaaggagatgaaaggctcttggttgctgagtacatgccaaatgatactttgtccaaacatctctttcactgggacaagcaaccattaccatgggaaatgcgtgtcagagttgcataccatgttgcccaggcactagatcattgtagcttggaaaaccgtaaaatatatcatgatctgaatgcatataggattctttttgatgaggatggtgatccccgcttatctagttttgggcttatgaaaaatagtcgagatgggaaaagctacagtactaatttagcttatactccacctgaatttttgcgaacaggcaggataatcccagagagtgtgatctacagttatggaactgttcttctggatcttctaagtggcaagcacattcctccaagccatgctttggacctaatcagagggaaaaatgttttgttgttgatggactcttctctagaagggcaatatgcaaacgacgatgctacaaagttggttgagcttgcttcaaaatgtcttcagtttggagccagagaacgacctgaaattacgttccttcttactgccgttgcgcctctttcaagggcagaagaggtagcatctcttgtggtaatgggcctaactaaaaacaccgcagtggcagtgctaccaaccacgctttctcctcttggnaagcttgtgctangatggatcttactgctgtgcatgatatattggtaaaaacagggtataanngatgagaaggtgcagaaaatgagctttcattcaaagatgggnacacaacagtacagatatctggacacaaaaaagtttggggatattgcattcaggagacaggatttcaaaatggcatcgagtatattcttaggttggggttatgaaggctgtcccttccgcactggggtggcagggaagccttctctacctggtgatgttcagcaaaattgtttaagaatgccctgcagccagttatgctacc

SEQ ID NO: 8318 - DNA, 943 bp, Glycine max
aaaataaacagaattatgtagattatgaatttatgcaggcatcacataatatcatgaacaccatggccttgtcctgtgttgtttttttttaacctcaataaacacctggttgacagtaagtaacccagtaggcatcaaccaatcaatttcattaacaatggaaaaattaccggtattccttcccaatttagagtgcataagcacagttttcaagttaaccgattcctataagatggtgaaataaaatgcatgtgccatctactccaccacttttgtatttctctgacacattttatactcattcaaacgttagttttgcttcccagctcaacctttatacagaacttgacaccctcaaattagcccactgcataaaactatgatcctctcgctcctctttgcctcttctcttccaatgcagctgcctcatttaacatatcagccgcatccttgtgcatgtccagttttgcaagagcaactgattgcatgtagaaagccgtgggccagtctggataaacgcactgtgcttgcattgcatctcgtagcgcaggatctggttgatcacataacagatagcatagactgcgccttgcaaacacagttggggagaccattgttccaacatcaataaactgggaatagttatcaatggctgtcctaaagtccttgtcacggaatgcatggtctccgcgcttccttgcttccagcatatctctcatctgttgagtccactcttgaaatgacaactcattagttccttcatcgtctctgtagtgtgtcgcaaccaagatcttatgtattgcagttaggtccatttttgaacaagcctcacccattgttgaaagaccccgttgtggggttgatggagcctcctcatgctttggaattccaagcatgatatgagtcttttcattagagtgtgcctataatcgtaggtgtgttg

SEQ ID NO: 8319 - DNA, 2300 bp, Glycine max
ttcccgggtcgaccccccctcgcatcaccccagttcaaagaaacttgacaccgattagattaggggcttcgaacaaggagccccgaaacccaaaccctaatctgattcgctttcgattatggcgtctgagagcgcttctcgatcgagttccgcggccgattcgtacattgggagcttgataagcttgacctctaagagtgagatcagatacgaaggtattctctacaacatcaacaccgaagagtccagtattggcctcagaaacgtgcggtcttttggaacagaaggaaggaaaaaggatggcccacaaatccctcccagtgacaaggtttatgagtatatacttttccgtgggactgacatcaaggatttacaggttaaatcttctccacctgtccagcctactccacaagtcaacaatgacccagctattattcagtctcactatcctttcccggtgaccacatctacaagtttgccttctgctgtaagtgggtctttgactgatcctagctctcataccacacaacttggacttcccgggtcaaattttcaagggcccttacctttgtatcaacctggagggaacataggatcgtggggagcttctccacctgctcctaatgcaaatggtggtcggcttgctatgccaccaatgtattggcaaggatattatggtgccccaaatgggcttcctcaattacaccaacaatctttgcttcaaccgccacctggtttatcaatgccttcatctatgcagcagccaatgcagtatcccaattttaccccccctttacctactgtatcttctaatttgcctgaattgccatcatctttgctgcctgtgagtgctagtacccctagtgtaacatctgcttccttgcctcctaatttgcctccagcaccttctgctttgcctcctgctccttcagccttgcctcctgctccttctgctttatctcccgttccttctgcaacgcttgcttctgaaatttttccagtatcagtagcaaataaggcacccaatgtttcaacttccgcagccatgttagcttctaacttaccatcactggctttgctgaccaatcctgctcgagatatcaatgctatagtgccacccatttccagcaaatcgaatgcaatttcaggttcaagcttgccctaccaatctgtatcccagttgtctcctgcagttgttgaatcatcgacttctatccacacagaaacatcagcaccttctttggtaaccccaggacaattattgaagcctggaccaattatagtttcttcggctcagccttcacaagcacctcataaggatgttgaagttgttcaggtatcatcaacatcatctcctgagccatctgtaccagtttctgtggaaactcaaccaccaatactgccattgccagtaacttcacggcccaatcacaggcctggtggagctcctacccaaactcatcatcatggctatagttatagaggacgtggaagaggaagaggaactgggggtttccgctcagtcacaaaattcactgaagattttgatttcacagcaatgaatgagaagttcaaaaaggatgaagtatggggtcatcttggtaaaagtaagtctcattcaaaagacaataacggggaagaaaatgcctttgatgaagattaccaagatgaagacaatgacgatgtatcaaacattgaggttaagcctgtttataacaaggacgacttctttgactcgctctcttccaacatgcatggtaatgcttcacagaatggaaggactcgatactccgaacaaatcaagattgatactgagacgtttggcgattatgtgaggtaccatggtggtcgtgggggccgtggccctggccgtggtggacgtactcgaggtggttattatggaagaggaggagggtatggctactctggacgagggaggggacgcggcatgccaagtcgcactttgtaggtggcagttaatgtttagtcatgaacatggtggagaacaagagcctaggtagccttccattaaagaaccataagtatgttagagattatgcttcattgttgtgttgcctgttatgtgtttgtttcacagaataagtaggacatttttttttctctcgtcatattaccctcttgttactcctctaccacttggtttgatggaaagatgtttgtacaacatattattttagcttatatcaacaggcagaagtttagactaatttattgcaggattgttgtttatgcatgtaattattagctagttattattcgctcttccatccaaaaaaaaa

SEQ ID NO: 8320 - DNA, 2158 bp, Glycine max
aaacaaaatgatatgtattatgtagattatgcaggcataacataatattatgaacaccatggccttgaccagtgaggagttagaagaacctcaataaacacctggttgacaatcagcaagtaacccagtaggcatcaaacaatcaatttcattaacaatggaaaaattaccggtattacttcccaatttagagtgcataagcacagttgttttcaagttgtaacagattcctataagatggtgaaataaagagcatgtgccatctactccaccactgttgtatttctctgacacatttaaactcagattcaaacgttagttttgcttcccagctcaacctttatacagaacttggcaccctcaaattatcccactgcataaaactatgatcatcttgctcctctttgcctcttctcttccaatgcagctgcctcatttaacatatcagccgcatccttgtgcatgtccagttttgcaagagcaactgattgcatgtagaaagccgtgggccagtctggataaacacactgtgcttgcattgcatctcgtagtgcaggatctggttgatcacataacagatagcacagactgcgccttgcaaaaacagttggagagatcatcgttccaacatcaataaactgggaatagttatcaatggctgtcttaaagtccttgtcacggaatgcatagtctccacgcttccttgcctccagcatatctctcatctgttgagtccactcttggaacgacaactcattagttccttcatcgtctctgtagtgtgtcgcaaccaagatctgatgtattgcagttaggtccattcttgaacaagcctcacccattgctgaaagaggacgttgtggggttgatggagcttcctcatgctttggaattccaagcatgatatgagaacgaacatcgggttttgtatgcaacggggcaagtgttgtgaccaaatcctttgtatcaggccgctcccttggttcatattgcaaacatttagaggcaagattaacaactaccgttgcctcttctgttgaaaacttcccctctaaatgtgaatccattaagagcatattgtttttcccctgtatcatatcaagtgcttgactgggagggatgtgcttgccactgaggaggtctagaagaacggttccaaagctgtaaatgacactttcaggcgtgacccttccatttcttaaatattcaggaggtgtgtaagcaagattggtgctataactcttaccatccctgctgttcttcataaaaccaaagcaagagagacggggatcgccttcctggtcgaagagaacacggtaagcattcaagtcatggtacaagggacgaccctcagagctgcaataatgcaaagcctgggcgatgtaaagagcgactcgcaaccgcatagcccactcaatagtctgagtttcccagtggaaaagatgcttggcaagagtatcattaggcatgtactcggcaacgagaagcctctcatcgccgtcgcagcagaaaccgatcaaaatagcgagccttggatggcgcaacttgccgacgccggaagcctcttcgacgaattgcttgggatcaggccaagcagacttgctgaacttcttgacggcaatccagcggctatggttctggaggcgacccttgtaaacaaggttgggtgccttctccccactctcagacacgatatagtcagagctgaaattgttggtggccgccttcagctcagccagcgagaactcagagaaggagaaatcaaagccctctttctcggcctcagagagcctctggtggtctttttccttttccttttcagggtgagtctccctctctcccactctcagcaacgtcgatgattggcaacaacccatcctttccctcctctctctctctctctctctctctctctcaccgatctccactttgtttcttgacccctaattactactaatcactctttacttattacattaaatgaatttccaacttcatcatcctcaatattacctttttatccatactagaaccctatctgcttcccttcttcaccaacccaaatcaatgcttcccattcttgttactattttacctcctactttttttgttacctggtttttcgacacattacaaatatcttcctcgaaccgaattt

SEQ ID NO: 8321 - DNA, 1131 bp, Glycine max
  misc_feature (1036)..(1036): n is a, c, g, or t
  misc_feature (1053)..(1053): n is a, c, g, or t
  misc_feature (1069)..(1069): n is a, c, g, or t
tcagctacgtaggccccccccccctgaattaccatcatctttgctgcctgtgagtgctggtacccctagtataccatctgcttccttgcctccatctaatttgcctccagcaccttctgctttacctcctgctccatcagctttgcctcctgcaccgtctgctctatctcctgcatcttctgctttatctcccgtaccttctgcaacacttgcttctgaaaatttgccagtatcagtaacaaataaggcacccaatgtttcaacttcagcagctatgttagctgctaacttgccatcactgaccatttctggtccagatataaatgctatagtgccacccatctccagcaaaccgcatgcaatttcaggttcaagcttgccctatcaaactgtatcccagttttctcctgcagttgtgggatcatcaacttctatccatacagaaacatcagcaccttctctcctaaccccaggtcaattattgcagcctggaccaagtatagtttcttcagctcagccttcacaagcacctcataaggatgttgaagtggttcaggtatcgtcaacatcatctcctgagccatctgtgccagtttctgctgaaactcaaccaccaatactgccattgccagtaacttcacggcccagttacagacccggtgtagctcctatccaaattcatcatggctataattatagaggacgtggaagaggaaggggaactgggggtttgcacccagtcacaaaattcactgaggattttgatttcacagcaatgaatgagaagttcaaaaaggatgaagtatggggtcatcttggtaaaagtaagtctcattcaaaagaaaaagatggggaagaaaatgcctttgatgaagattaccaagatgaagacaatgacgatgtttcaaactttgaggttaagcctatttacaacaaggatgacttctttgattcgctctcatccaacgtgccttggtaatacttccccagaattggaaggaccagatactctggacacatcaagaatgatactganactttggtgattttgtnaagcacctggtggtcntgggggccctggccctgccctggtggaattcccaagtggttatatgaaaaagaagaggttcg

SEQ ID NO: 8322 - DNA, 2355 bp, Glycine max
atcccatcactccaattgaaacctgaaacctgaaacctgaaaccgaatagatttagtggccttgggaatttattttaaaaggtacgatcaaagaatgaaactcataccctaatagtacataataatctctcatttacatcccgtcactccagttgaagctcgaaaccgattagattagaggcttcaaacaagaggccccaaaacccaaaccctattctggttcgcttgcgattatggcgtctgagagcgcttctcgatcgagttccgcggccgattcgtacattgggagcttgataagcttgacctctaagagtgagatcagatacgaaggcattctctacaacatcaacaccgaagagtccagtattggcctcagaaacgtgcgatcttttggaacagaaggaaggaaaaaggatggcccacaaattcctccaggtgacaaggtttatgagtatatacttttccgtgggactgacatcaaggatttacaggttaaatcttctccacccgtccagcctattccacaagtcaacaatgacccagctattattcagtctcactatcctcacccggtcaccacatctacaagtttgccttctgctgtaagtgggtctttgactgatcctagctctcataccacacagcttggacttcctggggcaaattttcaagggcccttgcctttgtatcaacctggagggaacataggatcgtggggagcttctccacctgctcctaatgcaaatggtggtaggcttgctatgccaccaatgtattggcaaggatattatggtgccccaaatgggcttcctcaattacaccagcaatctttgcttcaaccaccacctggtttatcaatgccttcatctatgcagcagccaatgcagtatcccaacttcaccccctctttacctactgtatcttctaatttgcctgaattaccatcatctttacttcctgcgagtgctagtattcctagtataacatctgcttccttgcctccatctaatttgcctccagcaccttctgctttggctcctgctccatcagctttgcctcctgcaccgtccgctctatctccttcatcttctgctttatctcccgcaccttctgcaacacttgcttctgaaattttgccagtatcagtaacaaatgaggcacccattgtttcaacttcagcagccatgttagctgctaacttgccatcactgaccatttctggtccagatataaatgctatagtgccacccatctccagcaaaccgcatgcaatttcaggttcaagcttgccctatcaaactgtatcccagttttctcctgctgtcgtgggatcatcaacttctatccattcagaaacatcagcaccttctctcgtaatcccaggtcgattattgcagcctggaccaagtatagtttcttcagctcagccttcacaagcacctcataaggatgttgaagtggttcaggtatcttcgacatcatcatctgaaccatctgtgccagttcttgctgaaactcaaccaccaatattgccattgccagtaacttcacgacccagttacaggcccggtggagctcctatccaaactcatcatggctataattatagaggacgtggaagaggaaggggaactgggggtttgcgcccagtcacaaaattcacagaggattttgattttatggcaatgaatgagaagttcaaaaaggatgaagtatggggtcatcttggtaaaagtaagtctcattcaaaagaaaaagatggggaagaaaatgcctttgatgaagattaccaagatgaagacaatgacgatgtatcaaacattgaggtcaagcttctatataacaaggatgatttctttgactcgctctcttccaacatgcatggtaatgcttcacagaatggaaggactagatactctgaacaaatcaagattgatactgagacgtttggtgattttgtgaggcaccatggtggtcgcaggggccgtggccctggccgtgttggacgtacccgaggtggttattatggaagattaagagggtatggttataatggaggggggaggggacgtggcatgtccagtcagaatttgtaggtggtagttatgtttattcatggacatggtggagaccaagagcctaggtacccttcccctaaaatctttgtaattatggtagagataatgcttcattgttgtgtggcctataatatgttcgtttcacagaataagtaggacattttttttcctgttatgtaacccttttgtaattcctaataaagttttttggtttggtggaaagatgtttggacaccattttatttttagcatatatcaacatgcagaagtttagact

SEQ ID NO: 8323 - DNA, 1621 bp, Glycine max
cccacgcttccggataaactggttgagcccggaaaaaacaataacaaaacaaaacgtggaggataaatcagctacgtaggccccccccccccctctctctttctttgaggcttctttccctctcttcgtcccttgctctgtgtcgccgtaacacaaaaagggaagagagagaaagaaccaccccacccaacaacagcttttgttcttcacaagacatagcttcgtgtgtgtgtttcttttcttccttccagcttggaaagactgaagtctctgtctttttcaggttttgggggtgttgttgaagatgttggtagcaaatagctttgatctatggcgaaaggacggttttttctctgcggcggaagaggtgcaggaatcagctgatataatggaatctgcatacagggcatggttgagagagaagagagaaaggtcaactcctgaggaattaaatgaactatgcagagagctgcaaactgctttaggtaccgcaaaatggcagttggaagaatttgataaagccgtcaggctaagctaccgacatcacggtgatgacaatacatccactaggcataggcagtttatttctgccattgaaagccaaattacccaggttgaagcagcactgagggaatcttacattgaggaaggtaagcaaccacttcggtgggtaaaccttgatgaagaagagcgagatgatctggctgcctttctatctggaacttgtcagaccacacaaagcactaacgatgactgcatggaggtgaaacaagccaagaaagaagataagattgtagatataaacactttccgcaaccgggatatatctgctagtgaaaagtcttctaaggatgtcatttctgttaacaaggatacagattatgtgatagaaataaaagcagatgctgtttctagaagtaatgatgatgtagtttctcaaacagatcgaacaactagtacaaggaaaacatggagtccacctaattatggtgctttaaaaattgtaattgctgatgaagatgagcagagagataaacctacacggactgttgatgccacccctaaagaaaaaggattcagaaatctattttggaaacaaaagtttgaagagtatcctcaggccatgcgagtagttcatatgttcaatcagcgttttgggcgcataggtatatgccagagccagaggcagtttcaaagtcccttgcacttgcgatatggctgttctgttcaagttacacttgctctaatgttgaccatttttctcattgttccctttgtactttattcaacttgagttaaacggctgcttcacgcaaagagggctttacttgtcttggtgtatcgacaaggtcactgatcatttgagatctcagccactgccttcaagtattggtgggaaaagttatagctaaaggcacagtgagtgccaccttctattttgtcgttgttgagattaagatgaatttacctatgtgagtgtggatacagataggataaccaacctcttcgtcctacagggacacctgtctattttagtttctcagctattaaaatgtacatacattcatccaatatttaatgcaagttccgctttatttggttgccaaaaaaaaaaaaaaaa

SEQ ID NO: 8324 - DNA, 964 bp, Glycine max
cccacctctcactgtgtctttgaaggcttctttctctctcttcttcccttgctctgtgtcgccgtaacacaaaaaagggaagagagagaaagaaccacccacccaacagcttttgttcttaacaagacaaagcttcgcgtgtgtttgggtttcttttcatccttccagcttggaaggattgaagtttctgtctttttctgatctccgcgtgcgtggtttggttttgttgttgaagatgttggtagctaatagctttgatctatggcgaaaggacgcttttttctctgcggcggaagaggtgcaggaatcagctgatataatggaatctgcatacagggcatggttgagagagaagagagaaaggtcaactcctgaggaattaaatgaactatgtagagagctgcaaactgctttaggtaccgcaaaatggcagttggaagaatttgataaagccgtcaggctaagctaccgacctcacagtgatgacaatacatccactaggcataggcagtttatttctgccattgaaagccaaattacccaggttgaagcagcactgagggaatcttacattgaggaaggtaagcaaccacttcggtgggtaaatcttgatgaagaagagcgagatgatctggctgcctttctatctggaacttgtcagaccacacaaagcactaacgatgaatacatggaggtgaaacaagccaagaaagaagataagattgtagatatatacactttccgcaaccgggatatttctgctagtgaaaagtcttctaaggatgtcatttgtgttaacaaggatacagattatgtgatagaaataaaagcagatgctgtttctagaagtaatgatgatgtagttactcaaactgaatcgaacacgtatacgaggaagacctgcaataccacctatcatggggctttgaaaaatgtcattgctggtgaagatgaccagagagaa

SEQ ID NO: 8325 - DNA, 708 bp, Glycine max
tagaaataaaagcagatgctgtttctagaagtaatgatgatttagtttctcaaacagatagaacaactagtacaaggaagacatggagtccgcctaattatggtgctttaaaaattgtaattgctgatgaaggtgagcagagagataaacccacacggactgttgatgccacccctaaagaaaaagggttcagaaatctattttggaaacaaaagtttgaagattatcctcaggccacgcgagtagttcgtatgttcaatcagcgttttgggggcattggtatatgccagagccagaggcagtttcaaagtcccttgcacttgcgatatggctgttctgttcaagttacacttgctctaatgttgaccatttttctcattgttccctttgtactttattcaacttgagttaaacagctgcttcgatcaatctgttcgagagggctttaattggtcatatgagatctcagccactgccttcaagtattggtgggacaagttagctaaagggacaatgagtgccaacttctattttgtcgttgttgagttacctatgtgagtgtggatactgataggataaccaacctcttcgtcctacaggaacacctgtctattttagtttcatagggctgttaaatgtatatacattcatccaatatttaatgcaagttccgctttatttggttgcacccctaaaaaaaaaaaaaaa

SEQ ID NO: 8326 - DNA, 2531 bp, Glycine max
  misc_feature (2328)..(2328): n is a, c, g, or t
  misc_feature (2343)..(2343): n is a, c, g, or t
  misc_feature (2347)..(2347): n is a, c, g, or t
  misc_feature (2364)..(2364): n is a, c, g, or t
  misc_feature (2396)..(2396): n is a, c, g, or t
  misc_feature (2401)..(2401): n is a, c, g, or t
  misc_feature (2405)..(2405): n is a, c, g, or t
  misc_feature (2411)..(2411): n is a, c, g, or t
  misc_feature (2417)..(2417): n is a, c, g, or t
  misc_feature (2419)..(2419): n is a, c, g, or t
  misc_feature (2431)..(2431): n is a, c, g, or t
  misc_feature (2434)..(2434): n is a, c, g, or t
  misc_feature (2446)..(2446): n is a, c, g, or t
  misc_feature (2460)..(2461): n is a, c, g, or t
  misc_feature (2463)..(2463): n is a, c, g, or t
  misc_feature (2471)..(2474): n is a, c, g, or t
  misc_feature (2476)..(2476): n is a, c, g, or t
  misc_feature (2478)..(2478): n is a, c, g, or t
  misc_feature (2491)..(2491): n is a, c, g, or t
  misc_feature (2499)..(2499): n is a, c, g, or t
  misc_feature (2502)..(2502): n is a, c, g, or t
  misc_feature (2513)..(2514): n is a, c, g, or t
gtggcatgtgccattactacatcatagtcatttcctattttctctttcagagatctgagctccaacatgttaacaggttcaatcccagattcatttcaggatttgggaaatctaaattacttgtttctgactaacaattctctaagtggaccaattcctgattggatactgagcataaaacagcaaattgatttatctttgaacaatttcacaaagacttctgcaaataattgccaaaggccggatctgaacttagcttcaagcctctctcgcacagcaagcacttcaataccttgtttgaagatgggccaaccttgttcaggaaaacccctgtttcattcactgttcataaactgtggaggacctgaaacaaagtttgagggcaatgaatatgaagctgacctcagtccacttggcatttcaaactatgttcctggtaatagtggcaaatgggcttatagcagcactggagtatatctaggaaatgcaaaagctgattatatagcaacaaatcagctatctttggatattaatggccctgattactaccacacagcccgcatagctcctctgtatcttaattactatggcctttgtatgctgaacggcaattataaagtgaaacttcattttgctgagatagcattctctgatgaccaatcatattgcaaccctggaaagcgtgtattcgatgtatcaattcaaggttttaaatatctgaaagattttaacattgcgaaagaagctggtggagtgggtaagggaatcactagggagtttaatgttaatgttacagaaagcaccttggaaatccacttatcctgggcaggaaaaggaactaatgccattcctataatacgtgtatatggacctctcatatctgctatcactgtgaccccaaactttaaagtttatgcacatgggttctctactggaacaattgttggaattgttgctggggcatgtgtgattgtcatattgatgctctttgctctctgctacgtaggccccccccccccgaaagatcaaacagaccaagaacttctaggtctgaaaacaggttatttcagtttaagacaaattaaagctgctactaataactttgacccagcaaataagataggtgaaggaggctttggaccagtattcaagggtgtactatcagatggtgctgtgattgctgttaagcagctctcctccaaatcaaagcaagggaatcgtgaattcatcaatgaaataggcatgatatctgctttgcagcatccaaaccttgtgaaactttatggctgttgcattgaaggaaaccagctgctgctagtatatcagtacatggagaacaatagtcttgctcgtgcactttttggtaaagaacatgagaggatgcaattggactggcccagaagaatgcaaatttgtctgggtatagcaaagggcttagcttatcttcatgaggaatcaaggttgaaaatagtgcacagggatattaaggcaaccaatgtcttacttgataaacatctgcatgccaagatctctgactttggtttagccaaacttgatgaagaagagaatactcatatcagcacaagaatagctgggacaattggttacatggctcctgagtatgctatgaggggttacttgactgacaaagcagatgtctatagctttggaattgtagctttagagattgttagtggaaagagcaacacaaattataggccaaaggaggagtttgtatatcttttagattgggcctatgttctccaagagcaaggaaaccttctggagctggtggatccaagtcttggttcaaagtactcctcagaagaggccatgagaatgctgctgttagcactcttgtgcaccaacccttctcccactcttagaccatgtatgtcatcagtagtgagcatgcttgagggaaaaactccaattcaagcaccaataattaaacgcggtgacagtgcagaagatgtaagatttaaagcctttgagatgctatcacaagacagtcaaactcatgtctcttctgcattctcagaagaaagtatagagcaaagaagcaaatcaatggggggaccatggcttgactcctccatatcacttccaagtagaattgattaggcttcaaccgatcaacttattagatattccaattatgtgtgatttgcaagtcggggaagttaactcattaaattttaattcatagttgcttgctatatgtatggtggtttaaaggctattaatggaggtttccaacaaaaaaaaaaaaataaaaaggaattttattcaaaactgggaaaataaaattatttggttttccctggnccccgggggatcccncttnttctaaagcggcccccnccggggggaaccccaccttttgtccctttagngaggnttanttccangctggncnaaccatgggccntanctggttcctggngaattggtatccgnncnaaattccnnnnananacggaccgaaacntaaagggnaancctgggggccnnaagggggaacctaccct

SEQ ID NO: 8327 - DNA, 1552 bp, Glycine max
tcagctacgtaggccccccccccattataaagtgaaacttcattttgctgagatagcattctctgatgaccactcacattgcaaccttggaaagcgtgtattcgatgtatcaattcaaggttttaaatatctgaaagattttaacattgcgaaagaagctggtggagttggtaagggaatcactagggagtttaatgttaatgttacagaaagcaccttggaaatccacttatcctgggcaggaaaaggaactaatgccattcctataataggtgtatatggacctctcatatctgctatcactgtgaccccaaactttaaagtttatgcacatgggttctctactggaacaattgttggaattgttgctggggcatgtgtgattgtcatattgatgctctttgctctttggaagatgggtttcctttgtcagaaagatcaaacagaccaagaacttctaggtctgaaaacaggttatttcagtttaagacaaattaaagctgctactaataactttgacccagcaaataagataggtgaaggaggctttggaccagtattcaagggtgtactatcagatggtgctgtgattgctgttaagcagctctcctccaaatcaaagcaagggaatcgtgaattcatcaatgaaataggcatgatatctgctttgcagcatccaaaccttgtgaaactttatggctgttgcattgaaggaaaccagctgctgctagtatatcagtacatggagaacaatagtcttgctcgtgcactctttggtaaagaacatgagaggatgcaattggactggcccagaagaatgcagatttgtctggtttttgctaagggcttagcctatcttcatgaggagtcaaggttgaaaattgcgcacagggatattaaggcaaccaatgtcttacttgataaacatctgcatgccaagatctctgactttggtttagccaaacttgatgaagaagagaacactcatatcagcacaaggatagccgggacaattggttacatggctcctgagtatgctatgaggggttacttgactgacaaagcagatgtctatagctttggagttgtagctttagagattgttagtggaaagagcaacacaaatcaccggccaaaggaggaggttgtatatcttttagattgggtaagttacacttttttgtgtggcttttgtgtttttgattaattgaagtgggagcataatacgcaaattatcccgtcatcatcacaaaatatacctagtttaatattttcaaaatatcttgcctttttcatctatatcctactataataatgatcggggataatttgatactataaatttaagtaggcatcattatgcttatctttttcttattacacaatttcctttcttgtttcctagttatggtttgcttgaatttctagtgctatttgttgcatgtcattgaaggcctatgttctccaagagcaaggaaaccttctagagctggtggatccaagtcttggttcaaagtactcctcggaagaggccatgagaatgctgcaggca

SEQ ID NO: 8328 - DNA, 1951 bp, Glycine max
  misc_feature (1946)..(1946): n is a, c, g, or t
acggctgcgagagacgacagaagggctcggggccttggaatatatttcaagccttgaatcaagtcaggcagggatgacaataaaggagtatgggaagattctgatagagcacaagccagtggagacaattcagattctcataaggctttgcacagaagatggtgacaaaagaggacgctcaaatggagtgtacatgtctatgttgccatctcctgttgattttcttagcatcttcattcatcatcctcagtcccttatggattttcttgaaaaatataccaataaggtcaaggactcacctgctcaagttgagattcacaataccctcttagagttgtatatatccaatgaattgaactttccttcaatgtcacaagttaatgatggtggaaattaccttaatggagcatcagcaaaaaccatgattttaagtgctcaatctaatggaaacattggtgatcacaaaagttcagagcaggaaaagaaccatctcgaaagacttgaaaagggtttacgcttgcttaagactgcatggcctccagagacagaacatccacaatatgatgttgatttagctattatactatgtgaaatgaatgcattcaaagatgggcttttgtatttgtatgagaagatgaaactctataaagaagtgattgcttgctatatgcaggcacacgatcatgaggggctaattgcatgctgcaagaggctgggggattctgttaaaggaggggactcatctctttgggcagatgtacttaaatattttggtgagcttggagaagattgttctaaagaagtaaaagaagttctgacttatattgagagggatgatattttgccccctatgattgtgcttcaaactctttcccgaaatccatgcctcacgctttctgtgctcaaagattacattgctcgaaagcttgagcgggaatcaaagatgattgaggaggaccgacaagctattgagaaatatcaggaagatacactggcaatgagaaaagagattcaagatcttaggacaaatgctcgaatttttcagcttagcaagtgcactgcatgcaccttcacccttgatttgcctgccgtgcacttcatgtgcatgcactcattccacctgcgctgccttggtgataatgaaaaagaatgccctcagtgtgcacctgaatataggtctgtcttagaaatgaaaaaaaatttagagcaaaattctaaggatcaggacagattttttcagcaggtgaagagctctaaagatgggttttctgtcattgctgaatattttggaaaagggatcatcagcaaaataagtaatggatccacttctggtcccgtatccggaactgcatcatccagtagtggtttctaaggcttgagatttctggcacttgctttctgcacttattctccatttaacattaaacaagttgggctttggatattggatgaaatttagttattttttcgggttttgattttctttattattgcttgttgactggggtccaggcttcatattttccataatgtgctgactgttataaagaaaccaggagtggttcgttcattaaggaaagtccttgaatggtcttcctctattgccagagtactgaactttctgggaggatttaaagtttgtctttctatggatcagaacagaacattttcatgacagcctctccttaagggaaataccggacaaatattcaaggcaatgtgagattggttaggtatgaattcaagtgatacttttctttttcttgtttttcattgtgtaaaattatgatggattacaatcatggaaatgagatttttactttgattgttttaatttttgtgaaggccttgagcaatagtaacaatatgaatacttgaatagtctgttttagctaaaaaaaaaaaaaaaaaaaaaaaaaaacaacgcggccgctctagaggatccnagctt

SEQ ID NO: 8329 - DNA, 1110 bp, Glycine max
ggttttgaagctgattttacaactcaaatctttctcccatctttctcgcatgctttgcggctcttctggtcacattcttcctcgccaccacggcttttgtaacatcgtgagtggtgcctcatttggcttctcctgctagagctaatttatcaaatagcatttttttttttctggagtgaggatacaatttttttagaaatatatcaatttattttcttcctctgcaattttagggtttcttaaacccctaaaatcactatgcaaaattccaaagtagctagagtcggagcttcgatcgttaaacacctctgcacaaggaattgtacatccttgtgtggagtaggatatattcgaagcgcaagatatcattacaagcaacctctgtttcaacatcattcatttactaagttatacaagggagccatgatagaaaagcataatttcctttcaacaatgactactaacaacactaccaaggaaaggagtgaacaagaacaagcgatatctgtaacttttattgataaggacggtgaggagaagcatatcaaagtccctgttggaatgtctatgttagaagctgctcatgaaaacgacatagaactagaaggagcatgtgaaggatcgattgcgtgttcaacttgccatgttatagtcatggacgtagaacaatacaataaattggaagatccaactgatgaggaaaatgacatgttggatctagcttttgggcttactgaaacatcacgtctgggttgccaagtgattgctaaacccgaacttgatggaattcgtttagctattcctgctgccactcggaacttcgctgttgatggttatgtgccgaaaccacactgactcatttgttttggttcaatgcaaagagtgttgctttcagttttgtaccctcaccgatttagataaatcggcatttattgatcatatcataggcattatttttgtattgtccgtgttcacggagcacctctatatatcaatttagagagagatcgatcatgttgtaattttcgacgggctacatttttgcgtgtcaataaattacttgtactgttttaaaaaaaaaaaaaaaaaacggaacaaacacgtccaaaa

SEQ ID NO: 8330 - DNA, 1211 bp, Glycine max
acggctgcgagaagacgacagaaggggaaggtcagctacgtaggcccccccctagctaggacgtgtttggagttggtttgagcgtattgaggcaatgacgcgaccttacggtgtgaaggggggccggaagcgaaagcacgccgaacccaaatacgacgaagaagaccaagaaacgcaaccaaaaaaagctgtggtggaggtggagcacaacaaagaagaagaacaacagcaacaaacaccagagggggatgaattgagcggtatcccaattacgcccagtgagaacaacaccaacaaacccaacgtcatcttcattctagaaaaagcttctttggaagtcgccaaagtcggcaagacatatcagctcttaaactccgacgaccatgccaatttcctccgcaaaaataacaagaatcccggagattacaggcctgacattactcatcagtcccttttatctattttggatagcccactaaataaagctgggagattgcggtcggtatacataaggactgaaaaaggtgttcttatagaggttaagccctttgttcgtattccaagaacattcaaacgctttgctggtgtcatgttggaattgcttcaaaaattgagcatatctgctgttggcaagcgcgagaaacttctccgaaccatcaaaaaccctgtcacgcagtatttgcctatcaactcacgaaaaataggtctatcgtatagttcagaaaagcttgtagatatggatgactatgtatcaactgttcccagcaatatggaccttgtctttgtggtaggagcaatggcccatgggaagattgagacagattatacagaagattatgtagcaatttcggggtaccctctaagtgctgcttattgtattacaaggattactggtgcccttgagagaaagtggaagattttgtgatttaacaccaccttcagttcatgcatgagagacgatttagtaataccagttccgtagtcaatttatgtaatacaagggatagggccttgcctagcagtgatataggaaataatttttttctgaggcattgatgtcctggaccagagcgatgtttcaatgtagtacttaaattaaatatgactagtatattattttgttaaaggatgcttatagaagccaaatctaaatgttgcttatactgcgctgaaaaaaaaaaaaaaaaagttactatttttttccttgtccc

SEQ ID NO: 8331 - DNA, 821 bp, Glycine max
  misc_feature (25)..(25): n is a, c, g, or t
gatgctaaatattaaataacacttnttcgtgacatggatttactttccaactaagcacaagctagactttggtccaaaaatattggacatttcccacatcaaaaacccaaaccctatcccttattcgcctttgtccaccctcaatggcctctgtttcagccacttctctcaggttccaaccctttctcaagttgtctacaaggactactacccaggggtgttacaaaacttcaagtttgggggcagtttctgtgggatggaataggagaacctttccctctttgagatcctcccgtttacgcatttgtgcagtcaaggcacaaccggagacagtgcagaaggtctgcgatattgtgaggaaacaacttgctctgcctgctgaatctgagcttaccccagacaccaaattttcagcacttggtgctgattcccttgacacggtggaaatagtgatgggtttagaggaagagtttggcataactgttgaggaggatggctctcaaaacatctcaaccgttcaagaagcagctgatttaatagagaaactgattcaagacaaaagtggagctagttagttaggaggtgaacaattctagggaaaatccattgagtgagggcacaagtgtaactgaatgaggttaattattcagcccattcactggccctttttttgtgcttacgcgtattctttagcaagctttttttggtgactttgttcaattttctatttgatgcaagaggtcaacccaaaacgcttttttttctatcaaaaaaaagataaaaatctcatttttttttcttaaaaaaaaaaaaataaaaaa

SEQ ID NO: 8332 - DNA, 1576 bp, Glycine max
  misc_feature (38)..(43): n is a, c, g, or t
tataccggatctggatgacgtgaaggaggcatcaccgnnnnnnaacttactagatgttaagataaaggatttaaactggagctttgttggaagcattttcagattttttttttttttttttcttttttttttttttttgtcaaaactgcttatataacaaatgtagatctagatctgttcaattcagacaaagttctagaattttttgaactataaacatagatacaattgtattagacagaatcttggtttcacacaatgagatcagttattctgtctttctggcttcaataattgactctgaaggatgacaaaaataatatcacaaccactccacaacgttcattccctcctgcatcttcactccatctaattgtctttgtccggtacatttccagttaatggtcttaattcggctctctcggcttaatcattagattgaactgatatatgattttggcagataattttataagcatagggagttttaggacaaatgcgactgtattttgtgccaaataacatttcctagattctatcttcaacaccacaaggagctctattacaattcaaggggcaagcttaaattaaacaaacagagaagcttggaaatctaaaaacaggaggtgtcagattttggaacttcaaataagagcaaacccatcagccctctgcctgactctcaatgtcagatatatcaataccaatgttccgaaacttgacaaaattgaaaacagaagagcaacttttctggaatcaaatgaggcagcacgtttatatcttctccatctgttacttggtaaatcatgtagcttctcagagactgctttatctctcggattgcccacatttaccagactctgcataagttttccccctttgaaacttgattctctccatagtacacttgttggtgagttcccagttttaaaactttcaactgcctcttcataggattcaggtgaaactgagtttccattgacactagggatatcaactatgcactgggaatacacatcctcattcttcatttgaaaatcaatgcagttttgacaatttatgtgagcatctaagcacattgtgtttttaacttgattaggaacctctaagatgctcaagaaagctagtggtgaagcacaatttgcattttcattttcctcaggcaacactgaaatactataaacatcttgagcatgtgaactgtgcaacccagctggaagtgaagtctcttcaaacagaatcggcggaatctctaaaggaaactgtcggttaaggtcatcactacttggtttattatgcaacttcaaaccgacagctacgtttccactcccgtccacaaactcccgaatttgatgttctttctggaaggaggagtcgacagccattaataatggcttggttttcgaagatgttttcgattcttctaaggaaaaggaaaaaagaaagaggaaagagaatgcgacagagattggcgtagaatttgaacgttacatggttatattatcagaggagctgaggaggaaggtctcaatttcgtagcaaacaactaggcggggggcctacgtagctgactcga

SEQ ID NO: 8333 - DNA, 1273 bp, Glycine max
  misc_feature (1210)..(1211): n is a, c, g, or t
aatttttttttttccaccaatccatgtgtccacacatgacatatcccacacaacttgttgtccctttaaggcttaagctccaccacgaaacaccaatcctcaacacacacaaaattctgttcagtttcacccactaaaccaccactactcctaagatctccttcaaaacacaaccaaaatcttaactttcttggaacctttttaattgtttcttctttaaaaatcaatttcctttaaggctttaactttaatattagagttctttctctttcattcatccttggtaatggcttgtgcattgcaagcaaccttagcagccaacacctatgccttttcttccaggagattctccttgaagcaccaaaagaacagtaagagaaggttttctttgttcactgttagagctgattctgatgactctgactgcaatgaggaagagtgtgccccggataaggaagtagggaaggtcagtgtggaatggttagctggggagaagacaaaagtagtgggcacattcccacctcgtcgtaagccgggttggactggctatgttgagaaggacactgctgggcagacaaacatatattcagttgagccagcagtttatgtggcagaaagtgctataagttcaggaactgctggctcttcttctgatggagctgagaacacagcagcaattgttgcaggccttgctctgatatcgattgcagcagcatcgtcgatactgctacaagttggtaagaatgctcctcctcagatccagacggctcaatactctggaccatcacttagttactacatcaacaaattcacgccgccggaaattactcaagtgtctgtgccaagtgaggctgaactatcctcatctgttcaacctgaaagcccacctccggaagtttcccaggttcaggttgaagctcaagcttctgagacctctagtgtgaacattgaatcgtaggtgtatcaagtggttaccacttttgctaccaaaacataccaaagaagtttattttgtgtatacacaactaaaggttaatggatgcaaatgttgaacatcattcttggtatgccactgctaccaactgaaagtgtgtttatcttttgcaggggaaagtgatgatatttagtttcagttttatataatcctcaaaatagtgaaaccacattggaaatttttataatgttctgttggttcctcacgaaaaaaaannttttttttctccccccccccccccggggggggggcggggaacccaattcccccacaaagggg

SEQ ID NO: 8334 - DNA, 1015 bp, Glycine max
aaaaacacctcacgaaagcgtcattggattcaatgcgagagagacaagtccagaaaagtaaaattaaatagcaacacatcaccgaacagaaggcaatgggtggagagagagaaatggcgaatggtgaatggtgaatggtgaatgaccccacagaaggaataaaacaggctgtggtagagctgtaaacgttccttttcaccactctttatgatatgatatattttctccgaaagcatagctttgagcaaacagcagagcataatgtttggcagtacaaaggcatcatcgctgccagtgtcgtcgcgttcagaggaaggaggccttcgcagacgtctttcttcgctgtctctgaagatccaagacagcccaacatggtcattttccagatccaagtccctctcatccatgggtgactatgtaaggacatgctgggcctggatcctctccaggaagctcatctttgccacagatctcgaaatgaacgaccagaaaactaagctccttggctcccccaacaggggcacttggagccatgttttctataagctgcgctctgagatcagaaggttcatctctacttctgatcacgccactcttcccaaaacctaccacaggtcctcacctcaagtcttctcataattccctccacatttctcaatgcttccttcaaataatttacctctttatttcagatccaccgtggaaatcattacgtaagccaattttatgtacaattcattcttcatgttaattttgttgcccgtacgcagttaattacgtgcatattatattaattgtggattgttataattaaatttgttgcctaatggaacaaattaaacatcttatttttagggtgcttgttgcatactgttattatcttgtagttgtattgtatggtggatgtagaacctgccaattttctgtttctgaatcccctgcccaagtaattcgtaaataatgatagctgaattttaaacttgttgccgtgaaaaaaaaaaaaaaaaaaaaaaaa

SEQ ID NO: 8335 - DNA, 879 bp, Glycine max
ccaaaacctctcgcacacgtgtccaatccttagtggacagccattagctacatacccagctaatattactcttttacgtggaaatcatgaaagtagacaattaacccaggtctatggattttatgatgaatgccagaggaagtatggcaatgccaatgcttggcggtattgtacagatgtgtttgactatttaacactttctgcaattattgatggaactgtgctttgtgttcatgggggcctttctcctgacattcgaacaattgatcagataagggtcattgaccggaactgtgaaattcctcatgagggtcctttctgtgatctaatgtggagtgatcctgaagatattgaaacatgggcagtcagtccccgtggagcaggttggctttttggatccagggtcacttcggagttcaatcacataaataaccttgatcttgtttgtcgagcgcaccaactcgttcaggaaggccttaagtatatgttccaagataaaggccttgtaactgtatggtctgcacctaattactgttaccgatgtggaaatgtagcttctattctgagtttcaatgaaaatatggaaagagaagttaaatttttcaccgaaacagaggagaacaatcagatgagagggcccaggacaggcgttccatatttcttataagttggtgcaaattttgttttgaatttattgtaaaattagacactcatgtatttatgctttgccttttaaaggtggattttattggtcacaagattaccaatcaaactatatcttagctctgggtcgcacagataattttatgtttaaatttttattgaaaaatattttttttcttaaaaaaaaaaaaaaaaaaaaggccggggggggccgcc

SEQ ID NO: 8336 - DNA, 1123 bp, Glycine max
catttgtggtgaacatggatttggaccagtggatctcgaaggtcaaagatggccagcatcttctcgaagacgagcttcaacttctctgcgaatatgtaaaagagatccttaccgcgcggccccccgcgcagcctgtcaatagtccagtgactgtttgtggtgatattcatggtcaattccatgatctaatgaaacttttccagactgggggtcatgtgcctgagacaaattatatttttatgggagactttgttgatcgaggttacaatagtcttgaagtttttaccatccttttacttctaaaagctagatacccagctaatattactcttttacgtggaaatcatgaaagtagacaattaacccaggtctatggattttatgatgaatgccagaggaagtatggcaatgccaatgcttggcggtattgtacagatgtgtttgactatttaacactttctgcaattattgatggaactgtgctttgtgttcatggcggcctttctcctgacattcgaacaattgatcagataagggtcattgatcggaactgtgaaattcctcatgagggtcctttctgtgatcttatgtggagtgatcctgaagatattgaaacatgggcagtcagtccccgaggagcaggttggctttttggatccagggtcacttcggagttcaatcacataaataaccttgatcttgtttgtcgagcacaccaactcgttcaggaaggccttaagtatatgttccaagataaaggccttgtaactgtatggtctgcacctaattactgttaccgatgtggaaatgtagcttctattctgagtttcaatgaaaatatggaaagagaagttaaatttttcaccgaaacagaggagaacaatcagatgagaggacccaggacaggcgttccatatttcttataagttggtgcaaatttttgtttgaatttattgtaaaattatagcaatacagtcatgtatttatgctttgccttttaaaggtggattttatggtcacaagattatcaatccaacgatatcttagcactgggtcgcacggataattttatatttaaattttattgaaaaagatttttttgtgctgaaaaaaaaaattttaa

SEQ ID NO: 8337 - DNA, 1282 bp, Glycine max
tcgagtagctacgtaggccatatgtaatatgtgttagtttgttgactcctttgaacctaacgtaacctgatccgtggctctggttctggctctggctctgccctttttggttttctctcgttaccgaaaccagaagaaccatttgtggtggacatggatctggaccagtggatctccaaggtcaaagatggccagcatcttcttgaagacgagcttcaacttctctgcgaatttgtaaaagagatccttattgaggagtccaatgtgcagcctgtcaatagtccagtgactgtttgtggtgatattcatggtcaattccatgatctaatgaaacttttccagactgggggtcatgtgcccgagacaaattatatttttatgggagactttgttgatcgaggttacaatagtcttgaagttttcaccatccttttacttcttaaagctagatacccagctaatattacccttttacgtggaaatcatgaaagcaggcaattaactcaggtctatggattttatgatgaatgccagaggaagtatggcaatgccaatgcttggcgctattgtacagatgtgtttgactatctaacactttctgcaattattgatggaactgtgctttgtgttcatggtggcctttctcctgacattcgaacaattgatcagataagggtcattgatcgaaactgtgaaattcctcatgagggtcctttctgtgatctaatgtggagtgatcctgaagatattgaaacatgggcagtcagtccccgtggagcaggttggctttttggatcgagggttacttcagagttcaatcacataaataatctggatcttgtttgtcgagcacaccaactcgttcaagaaggccttaagtatatgttccaagataaaggccttgtaactgtatggtctgcacctaattactgttaccgatgtggaaatgtagcttctattctgagtttcaatgaaaatatggaaagagaagttaaatttttcaccgaaacagaggagaacaatcagatgagaggacccaggacaggcgttccatatttcttataagttggtgcaaatttttgtttgaatttattgtaaaattatagcaatacagtaaatgcatttatgaattgggcattgataatcgtgtattggtgctttaccttttaaaggctgattttattgatcataagattagcaaccccgttaaattttcactgataatttagtagttaaattttgattgaaaaatatatattttttgcttaaaaaaaaaaaaaaa

SEQ ID NO: 8338 - DNA, 1533 bp, Glycine max
ctaatgcccccatcagtgaaggaatcaatggttcagctacgtaggccccccccccaagttgaacggaggttaagccaacctgatgataagttttctgttgatttatccacccgacccatgacaaacagtgttgaattcagacatgaaacctctcagccaactgctggtattatttcaaatgtcaccggccctggatcttcaagaacactgattccttctcagaaacctggtttgcttggacctcctgtcaagcatgatggcaactctgttgatcgtgattatgacatgagaaaaggacttttaggcatgaggcatggtccagatataagaggtcaaatttcagctgaacctcctctgatattgaggccacctaatcaagcatcaccatctttgatgcagccatttggaggtgggttggtagaagatgatatagccagcagaagtcagaccaatagttggccttctgcatctgttaaagaatctaatgtaataaagtccgataagcatcaggctcaacagaaaccattttctaatagtgtcataggttcatcccccaatgttttactcccacaagcatcacaactaaaggctgaagaggcaacttctgtttctgatttgcagaggcagattgttccatctaagtctcagctatcatcagagtatgggatatctcagaatcatgcctcttctaacagcaaagattttcaacatgaagctggaaaaatgaacttcttatcccctctatctattcaagtgctgcaagaaattgggaggcggtgtaactctaaggttgaatttaagtctattttaagcaccagcaaagacttgcagttttcagtggaggtactattcactggtgagaaaataggtgttggtatgggtaggacaaggaaggatgctcaacaacaagctgcagagaatgctcttcgtagtttagcagagaagtatgtggcacatgtggagcctcaatgtagagctgtcgataaagattttgacaagctttctcttggatgtgacaatggtttcttgtgggatgtgatcaatccagaatccagtgaaccgcaaccagaagatggagtgtctagagaaaatgcttctgaggctttggatgctgagactaggtcaagtacccctaacgccactaatcagcaaatggacaagcgtatgagctccccgaggatgcccaattctaaacgattgaaggaatgaaaaagttccaagataaacaagatttaccattagtgcagccagcaactggagaattggccatctgaattcttggaacggcatattatcattttatacgtaaaaggttttgatgtaattctcgtgtaatatctctgccataacagttgtagatgtgacaaggtaatttcccttagctaaattctgttatagagaagggcattatttttattttgttttgccctactattttcctcattaggatgtttctctagcttcctgttcaatgccatattagttggaatattaattacaagaaaatcatttctcctttgtaattaatccctt

SEQ ID NO: 8339 - DNA, 1134 bp, Glycine max
tcagctacgtaggccccccccccgggcggaagcgttgactggtctttcccttctcactctcttctcttcacaataaaaatccaatctgtgttgttcagcgcagcacgccaaatcaaagcgcgtgagaaaagcagaaatggcggcggctacggcgatttctcagctaggctgtttttccgccgtccaccgcagctcacacctccggcgccgctcgtttctgttcccttcccctcgctccaagttatcggttgttatgagtctggagaggcatgacacggatactgctgggtctgataccaaaaatacactaagttatgcagttgatgtgtcaaagctacatgttgaagaaaagaagaactcatattcaacaaaagatggccatgatgctgaaaaaatagggtttggagaggcaacacaggaaagtgtcgatcaaccgaaaaggactgcaaagattcatgacttctgtttaggcattccctttggtggatttgttttaacaggagggattattggattccttttttcacggagtcctgcaacactaagcagtggtgtgctctttgggggtgctttactattcctcagcacctttagcatgaaggtctggaggcaaggaaactcaagtttaccatttattctaggacaagcagctttggcaggggttcttatctggaagaacttccagagctactcattggcaaagaaaatatttccatcgggcattagtgctattataagttctgcaatgctctgcttttatttatatgtgcttatatctggaggaaatcccccgcctaagaaattgaaggcatctgccagcactgcatgatgagatagtcaaggttatgctagcctatatagaatatggggatatgattcttatttttctgtgaattgaaataagttttggatgaaaatctgataatttatatctatatttttttttataaatcataatcgttattttcagtccattttagctgtatattcagaattgggctacattctggtccacatgtgatgtattggatgttcaatgatttctgatcgaaatggattcagcttaaaaaaaaaaagaaaaaaaaaaaaaaaaaaattaaaaaaaaaaaaaaaaaaaaaaaaaaaaaaaaaaaa

SEQ ID NO: 8340 - DNA, 1034 bp, Glycine max
gttgaccggtctttctgactctcttcacaataaaatccaatctcagcgcagcacttcacatcaaagcgcgtggtgagggcagaaatggcggcggctacggcaatttctcagcttggctgcttctccgccgtccaccgcagctcacacctccggcggcgctcgcttctattcccttgccctcgctccaagttatcagttgttatgagtctggagaggcatgacacagatactgctgggtctgataccaaaaatacactaagttatgcagctgatgtgtcaaagctacatgttgaagaaaaaaagcactcatattctacaaaagatggccatgatactgaaaaattaggttttggagaggcaacacaggaaagtgttcatcaaccgaaaaggactgcaaagattcatgacttctgtttaggcatcccctttggtggatttgttttaactggagggattattggattcctattttcacggagtcctgcaacactaggcagtggtgtgctctttgggggtgctttactattccttagcacctttagcatgaaggtttggaggcaaggaaaatcgagtttaccatttattctaggacaagcagctttggcaggggttcttatctggaagaactttcaaagctactcattggcaaagaaaatatttccaacgggcattagtgctattataagttctgcaatgctctgcttttatttatatgtgcttatctctggaggaaatcccccacctaagaaattgaagccatctgccagcactgcatgatgagatagtcaaggttatgctagcctgtagaatatggggatataatatcttatttttctgtgaattgaaataagttttggatgaaaatctgataatttgtttctatagtttttcttatttataaatcataatctttattttcagtcaaaaaaatttttagttgcatcttcagaatggggctacatttccggtccacatttgttgtgttggatattcagtgattccttatcaaaatggatccagcttatattttctca

SEQ ID NO: 8341 - DNA, 2376 bp, Glycine max
  misc_feature (34)..(34): n is a, c, g, or t
cccacgcgtccgtacggctgcgagaagaccacangatgggacaccacataacgaaaacacccatactctctctttctctttcattctttgatgcctttctacaaaaacacaaccttttaactgttatttttttttttttcgtttgctccttattttcttcgccgaatcctagaatgtcatcgccggggttccctggcggcggtagtgcgtctgagtttttcgctggagcgggtgttttcggcggcagatccattccgggggccaccatgaacaaccccaacgccgccgcttccgccaccatcaacaacctccaccctctctaccgaacccaacaacaacagaaccttcccgcaatgtttctagatccttcctcgcagatcgcccaacgccaaacaccaaccttcatcggtaagcgcaccctaaccgaattccaagcctacaaccaaaccaacaacaaccccaaccacgtcctctcgaacctcctgcttcgttccgttaagccccggaccagtttataccacacctctatggactttcctgttcccgaattgcaaaaccaaaacctttattccaaccaaacgcagcgttttggtgttccgttacttcaccagcttcgtcctcagcccattaatctccccaacaacgggcccgtgcccatgacaggcccaaatttcggttaccggaactcgaatttgggcttaccacagaaccagaaccgggttcgtgtttctctccctgtttctgttccggttcaggttcactcatctgaaccggaaaagaagatcatggaccacaggcttctggaattggagaagcagcttctggaagataacgacgacgaaggagaagctgatgctgcgtctgtgataaccacgagcgagtggtccgagacttatcagaatttaatcagtcccagtccggttcagaaaccggttttgacgaccacgtcgccgacttcttccacgacgtcgtccacgtcatcttcttcctccgtggcttcgcctgcttccggatgctccaagcaaacgctcatggaagccgcatctgcaattgttgaaggtaaacacgatgttgcggcggagatcctgaaccggttgaacggtgtgaaccggagtgataggttgacggattgcatggtttcggcgttgaaatcgaggatgaatccggtggagtatcctccgccggtggcggagcttttcaggaaggagcacgccgattcgactcagatgctcttggagaactcggtgtgcttcacggtagggttcatggcggcgaatctcgcgattctggaagccgcatttgaggagaaaacggagacgagcaggttctgcgtggtggattttgagattggacaagggaagcagtatttgcaccttctcaacgcgctctcggcgcgtggacagaacgtggcggtgaagatcgcagccgtagcagaaaaaggaggtgaggagagagtgcgggctgtgggagacatgctgagattactcgcggagaggctgaggatccggttcgagttcaaaatcgtcgcgactcagaaaatcgccgagttgactcgtgagtcgctgggatgcgatgcggacgatgttctcatggtgaacttcgcgttcaagctgaacaagattccggacgagagcgtctccccggaaaaccctcgggacgagcttcttcggcgcgtgaagagactcgcgccgcgcgtggtgacggttgtggagcaggagataaacgggaacacggcgccgtttttggcgcgcgtggcggaaacgctgtcgtattacggcgcgttgttggagtccattgaggccaccacggtggggaaagataacagcattaacaactcagaccgagtcagactcgaggagggactgagtcgaaaattgcataactcggtggcgtgcgaaggaagagatcgcgtggaacggtgcgaagtgtttggaaaatggcgcgcgcgtatgagcatggcggggtttgagttaaaaccactgagtcaaagcatggtcgagtcaattaaagcgcgactcatctctgccaacaaccgagtcaactcgggactcaccgtaaaagaagagaacggagggatttgctttggttggatgggaagaacactcacagtcgcatctgcttggcgttaacttggctcatttatttttctttcttttttctttttattttggttcggaatattattatatataatatcacattgttactatattttaacgtcatctagagataatggaaaggcaaagagaatagatttggtaaattattattattataaatatagtatgataaaagggcctaaagaaaatctcaaggaaagcccctcctcttggttctaccgaactaaaactaataaagaagtgtttggattccgag

SEQ ID NO: 8342 - DNA, 2611 bp, Glycine max
gggaccgggccccccgcccgcagctacgtaggccccccccccgacacactatcctcttaacaaaacacaaaccagtgttcagtgttcagtgttcagtgttcagtgttacacttcacacagacaagaatccaagacaacaagggaaaccagacacatcattaacacacgacacaaacatcctcactactcttccatcttcattaagttaagtccttgtgggtcagggagcattcaagcagtgaggcccaactaattaacctgtttctctttactggatataaggcaattaaaccatgcaaacaccaaagacaagaaatggatcctctgatgtgcctcagaaggtgtctccacgtgctgtacgccaactcaagcctactactctggacattgattctgcatcttctttaagtcaggctactaaatcatcaaaagaaagaagccccaaagtcactgaccgcagatcacccagaagcccagttattgagaggaagcgccctagcaaaatatctgagttggaatctcaaatttctcaactccaaaatgatttgaagaaggtgagggaccagtttatcttgtccgaatcatgcaagaagcaagctcagcaagaagctgaggagtccaaggagcaactattggccctatctgcaaaacctgaagagtcacaaaaacaagttctggatctttgtgctactggagaagctcgtgttcttgagctccagaaaattgtagaagaacgtgatatggcatgccgatctgagcttgaggcctccaaaaagcagctctcagttgagtctgcttccctggcatctgcagcgaatgaaattcagttgctcaaggcgcaacttgaattggttgctaattgtgagagcgtgcaatctcaacatgcagaatcagcagacatggagctactaaaccttaagcagaacttgtcagaaactctttctcttgtggacgccttgaaaaaccaagtaagggattgcaaagagtctgaagctcaggcccaagcattggtcaatgaaactacggtgcaacttgaggccgcaaaaggaactgttgagttcctaagggctgatgttgcaagagctgttgatggctacaactccgttgctttagagttagaccagtctaaagctcgggtgaactcactagaggcacttgttagcaaaattgagaaagaccccatcaataataaatgcatcccttctgaaaatgttgcagatgaccataaatctgagcaccaacctgaaatattgaaagagggagaggatcctaatcagctggaagcagaagttgtttctttgaagtccgaggttgaacaattgagatctgctatagagactgctgagactaaataccaagaggaacagattcgaagcatggtgcagatcaggaatgcatatgagttagtagagcagataaaatctgaatcaggtaagagggaatgtgagctagaggctgagttgaaaaagaagaaagctgatattgaagagttgaaggctaacctaatggacaaggaaactgagttgcaaggcattgtggaggagaatgacaacttgaacctaaagcttgaagagagcatgtcatccaaaaatgagcacaaactcaaaagggaaattaaaagactatcagaatgtgtggcagaactgaaggcggatatgatggacaaggagacaacactgcaaagcatatctgaagagaacgaaatgctgaaatcggaaatcaacaacagtggcaaagcgagagaggaagttgctgctgaagtagagggagccaaggcggcagaacacgaggctctcatgaaacttgggattgtgatggaggaagcagataagagcaacaagaaggctgcaagagtggccgagcagctggaagcggcacaagctgcaaacttggaaatggaagctgaactgagaagactgaaggtgcagtctgatcagtggaggaaggctgcagaggcagctgctgctatgatttcaacagggaacaacaatgggaggctcacagagagaactgtgtctttggataacaacaactatatgtgctcaccctatgctgaagacatggatgatgatttccagaggaagaaaaatggcaacatgctgaagaagattggagtcttgtggaagaagcctcaaaaatagttgtgatgatgtctgatttatgaagtgttctgaaattgtagtccaataaatagtgtgttcatgtcatgtttattactatgtcttttgcaattgtctgacccctacattaccctctgcactgcactgtaaatcctgcccctatctgaaactgtttgtgaactgtacttgaaacattggcgtttaattattgaacaaaaaaaaaaaaaaaaaaaaattcctgcacccccggggattccctagttccaagagcggcccgccaccgcgtggggcactcccgctttttgtcccctttagggagggttaattcccagttggcggtaccctggacaaagctggttcccggaggaaatgggtcccgcccccaaatccccccaaatacgaaccgggaaacaaaatgggacacgctgggcgcccaaatggagggcctacctcccttatttggcgggcgccccggccgctttcccacggga

SEQ ID NO: 8343 - DNA, 1570 bp, Glycine max
  misc_feature (19)..(19): n is a, c, g, or t
  misc_feature (21)..(22): n is a, c, g, or t
ttttttttttttttttttngnntatttttttttttttttttttttttttttttcaggaccaatttcataatactctaacattcacgatccatccatgatttatttacggcatgatatgtttattttccatcaagcacagaactcacaacatatatagtgcaagcctatgcaccttggcatttattctagtatatttattcttcatgcctaagaacggtcaaacaggtctgtaacagctttaataaatggtcgtccccttttttccttcgatttattcctcaaacgcagctgcttctcagtgtacagaacctcagccagccttttaagagctttagcatttgttccccattctttttcttcctctggttgaaaagtagtcacattcatgctataaactggttgtttcagcaagttctgtccaaccttttcaagattttccaagttcatagcagtggcattatcgagggcatccatggatggatccaagttatattcctgaattcgaaggtagtagtcagaagattggaggcctgggtagactgtggtaaggtaaaactcagtcatatctttagaagcataatcataagcattagttgcaaggcctgaccccgcccatacagttgctgagaactgatctgcaacttgggcatcataacccacagccttcgcagttccacagcctatagacaataacaggattttggtatattcatttgactttttataactgatgtcgagattcttttccagcttctgttgctttatcacttcattgacagcagccatggccggattagttgctgcaacgccaccatcaaccaaattgaattcagtgccatcattctcaaagtaatagggtggaagataagttggtgctgctgaggtcccaatgcatatatctgacagcttcgcatcaaagctaggaactgtcttcagctgaaagtttgagaatataactgggtgaagtttcttaaggtcgaaggttggtattacaacattggtcagtgtctggctcaatcgcgtatcctgcagcaactcacgtgctttattatgtaagaacttgccgtcgtacttgggacccgggaatgcattatcccaaccactagtttcattgaatatagaaggaccgtattttttataaaattctatgattccgctgggagtaaacagagggtgagtggggtcgtctgggtgaggagtagtgagcatagcagtcatgagtcctcctgtgctagtccctgctatgacatcaaaataacttgctagtgatgcacttttatcccatgcctgaagagccttttcgaagtggtcaagaactacagctggaatgataccccttataccacctccatctatgctgagaatggttacgaggtttccatagattggagatggtagaggtgtattgagtccaccgatcaactgagaagaaaaaactaggaaaagcaaaaggaacgcagacattttttttttcttttctaagtgtttcaaaagagaatagaagttgaaggggatgtcaagaatgaacaccttgtgggggggggggggggctacgtagttgcggccccga

SEQ ID NO: 8344 - DNA, 815 bp, Glycine max
  misc_feature (761)..(761): n is a, c, g, or t
  misc_feature (804)..(804): n is a, c, g, or t
atttaattataaattaagatgtgatttaaggggagataaggccatgtgaggggtcctctctgagattttgctccaaaaccttccccttcatctgatttgcagagactaacccaagaaaggaccaaccaaaaccaagtgctttcttggagcttggtagagagagaaagtcccactttctctctcttctcttttttctttctgtgtgtgttgtgtgcgtgcgtgcgtctgagggtacatgcaaaacagtgagtttgagatagagaaagaaggagttcaagattgttgttcaattttgcaaaaactgcccatcaagtacttttgttgttttttttttcgattttgcttcttatccaacccgttcttgatttggaaggtgattccgggaaggaattgttagggtgctgctgaggctgttcatcacctatctttgtggtgttgaatttgccacttctgataaagacagaagaaagcaccggattgaaggttgagttgttgttgttgcttgttgctgcttctgtctcttgttgtggagactatgttggagggtcgttcctgcgtggttccgaggttgtttcccagttcttgccaggcagataacaagtggtctttcatgacatacctgccggacttggacataaagaatggcaagcgccctttagacactgatgggggaggaagaaccccagccaaggaaggtgaataggagaggtggatttctcgccatcatggcgagacccctccggttcttggttcaaaaacanatcggggcatgctgatgatttctgtgatccacaaatggatcangatccgaggaa

SEQ ID NO: 8345 - DNA, 907 bp, Glycine max
tttttttttttttttttttttttttttttttttttacgtaaaggtgtgcacctattatcattcaaggaacaaacacataaaactgtgcatgaaaagagaatatcaaattggaatcataacagaaattatttttgaggactcattcatcagcaactacttcgaaaaacaaataagcttacgtcacactcaattcatcttaaaacaagactacaagaacaaacagaatgacttggcaatccatggtgttcaccatatacaccaatgtgcacatggagcatacttatttatgataagttattattatggctagaaaacagaaagaaaaagacaaacttaagcataaccaccttattaactaccatgcatcacattaatcatgcatgagttaactcatggtgcagctggtgctggaacacttccaccactgccgggaatgggaacctcataaccagggtttgggacaaaagtgtcatcaccaccaggaacataactgctacctggtggtgatcctgatcctgttgcggttcctgctcctccatttccattgccaccaggtaatggattttgaggtgtgagatgaaatttatgtggaaatccaacaggtccaatccctggaatatacaccccaccttcatgcttgaacaagaactcaggctctttcttttcctctgagttggagttttcgccaatgctgcgtccagcagctgttgtatcaaggaggaggatattggaaactagaacaagtgcaaggaaaaacgaaactttgaaagccattttttcagataataaaattagtgttgaaacttgaaagcaataaaggaggggaattgaatggctcaggtgtctttgatttggtgtgtcacttttgtatgtgttgggggggggggcctacgtagcctcgccccga

SEQ ID NO: 8346 - DNA, 1045 bp, Glycine max
ataaatataaattccggtccaatcctccttgttgtttcgatcagctacgtaggccccccccccaactgagcacgttgaaactcttggccaaaatggtatccgagttaatcaatgcaaaccctatcatatatgaaaagaaagagcgtcgacctcgaactgctccatctgctccccatgatgagtatgctgtcgaactaatcgaccaacaagaggtttttgatatcctttttttaaattctaaattttaaatttcatttgttttgtttttacttttagtaattactcggaaaataaaaagttgataatagtaactttaatattttcttaacattcacaaatcatataagagatataaaggaccctgagcacccatattccttggaagagcttaaggtgatcacggaggaagcagttgaagttgatgatcaacgtaattatgtgagggttatgtttactcctacagtggaacattgcagtatggcgacagttataggtctatgcttacgtgtcaagctcatgagaagcttgccttcacgatacaaggtggatatcagagtggcacctggatctcatgcaaccgaagctgcagttaacaaacaattaaacgataaagaacgtgtggcagctgcactggaaaactcaaaccttctgaatatggttgatgattgccttgctccatcttatgattgaaggaacttttttcctcctccaaatgcaatgaactatgtaggtgcttttatgcctgtcgtagaagttggtcagctttatctgtgtttatgatatttttggttgctggcatattggtcttgctatttgtggttacctcatgcaattcgttaaataggatacgtagttgaaaatgtgatagttgagtaaggttccaaggttctttgatcattagctaaaagaaaaaaattcagctcatgtttcatagattgaacaatttataccgtgtttggttgaacttttttgagatattataaaattagtttatatcaattacattaatttatggaaattaaaaaagaaaaaaaaaaaaaaaaaa

SEQ ID NO: 8347 - DNA, 1340 bp, Glycine max
  misc_feature (1337)..(1337): n is a, c, g, or t
cctcgtgccggttcggtcaaattttccgtggccgctaaaaagggctatctcaattttttccttcttctcctctgcgttgcaagattcttggaaacccccaaattcttgtatttgattagaaaaggtaactggttatcctttcagtgattgtttttatctgtatcaaccccctggcagtatttttcatttttcagttaaggctccagctatcatatttgggttggttttttaataataaaaaattgataaattccggttcaatactctttgtttccctaccgagcaagttgcaactcttggccaaaatggtaactgagttaatcaatgcgaaccctatcatatatgaaaagaaagagcgtcgagctccatctgctccatctgctccccatgatgagtatgctgtcgaaccaatcgaccaacaagaggtttttgatcatataagagatataaaggaccctgagcatccatattccttggaagagcttaaggtgattactgaggaagcagttgaagttgatgatcagcgtaactatgtgagggttacatttactccaacagtggaacattgcagtatggcaacggttataggtctatgcttacgtgtcaagctcatgagaagcttgccttcacgatacaaggtggatatcagagtggcacctggatctcatgcaactgaagctgcagttaacaaacaattaaatgataaagagcgggtggcagctgcactggaaaacccaaaccttctgaatatggttgatgattgccttgcttcatcttatgattgaaggaacttttttcctcctccaattctccaaatgcaatgaactctgtaggtgcttttatgcctgtcgtagaagttggtcagctttatctgtgtttatgatatttttggttgctggcatattggtcatgcaattagttgaataggaatacatagttggaaatgtgatagttgagaaggttccgaggttatttgatcattagctctagaaaagaaaaaggaaattctttccatgttttgaaattctcagctcatgcttcatagattgaacaatttataccatgtttggttgagaagttgtaaaagatgaacatttcattagcgatggcaacacttgttgtctggcttttttcatgggtgaagttatgtctctggaactgcatctgccatgtggttatgcagattttgttgaatctgccatcagttctgtaacagggattggggacccatgagatagtcaacagatgatatggagttttttttattctgtaaccttttcgaatgtgtatttctgatgcccaattttatcaaataatattttactttggctgacccnaac

SEQ ID NO: 8348 - DNA, 974 bp, Glycine max
  misc_feature (967)..(968): n is a, c, g, or t
cgtccgacttgttcagatcgcttcggcgtcccattcgtccgtccctccaatacctcaatctctgcgttgtaagaggaagccacgattctttgaaaccccaatttctggtagttgatttgaaaaggctccagcaatcatatttgggatggtttttaagtaaataaatataaattccggtccaatcctccttgttgtttccctaactgagcacgttgcaactcttggccaaaatggtatccgagttaatcaatgcaaaccctatcatatatgaaaagaaagagcgtcgacctcgaactgctccatctgctccccatgatgagtatgctgtcgaactaatcgaccaacaagaggtttttgatcatataagagatataaaggaccctgagcacccatattccttggaagagcttaaggtgatcacggaggaagcagttgaagttgatgatcaacgtaattatgtgagggttacgtttactcctacagtggaacattgcagtatggcgacagttataggtctatgcttacgtgtcaagctcatgagaagcttgccttcacgatacaaggtggatatcagagtggcacctggatctcatgcaaccgaagctgcagttaacaaacaattaaacgataaagaacgtgtggcagctgcactggaaaactcaaaccttctgaatatggttgatgattgccttgctccatcttatgattgaaggaacttttttcctcctccatatgcaatgaactatgtaggtgcttttatgcctgtcgtagaagttggtcagctttatctgtgtttatgatatttttggttgctggcatattggtcttgctatttgtggttacctcatgctattcgttaaataggatacgtagttgaaaatgtgatagttgagtaaggttcctaggttctttgatcattagctaaaagaaaaaaattcagctcatgtttcatagattgaacaatttnnaccgtg

SEQ ID NO: 8349 - DNA, 938 bp, Glycine max
tatatatttacatgagctaggtaggcgacattaatgcttgttcactaagcaatacttgacattttgtgggattgctgatctataattctggtagttgaataggctcccccagacatttttggcatcttgaatgtgtgtttgtaaccatttgtcaacaaatgcaacctgagcagcttcgtttgagcctggcaaccattgttcagggtagagatgcatggtagcaaaatcaacttggtgaactaggttgttagaaatgaaatcagtgccaataagttggtacccaggattgaattgttttttctctggcattgtttcaccatagaacccttcgagtcctatttctaacaaatgattgttgtcgatggatttgacgtaggcagccatctcaatcacccattgctgaataacttttccggagttgtcgtgttgggaacggggttcattgataagttcccacgcaaatatggcaggatcgtccttatatgccaccccagttattgtgttttttcttgtcaacacagccttaatatggtttttgtaatgttgcttagcaataggatgtgaaaagaaatcatcttcactgttcacgtactgtccatgttccttcacccactgtacgtactgatttttgccaccaaaatctttccagttgttcaccaagctcagtatcaaacgcaccccatattttcccgcttctgatactacaaagtccaatcccctgaatactttctcgtcgtaggaaccaggagaaacctgaagggctctataacctccatcactgaaagcccaagttctagcaacagttaagccatggctagaagcttgttgcaaaacggcagtgaccttgggccttgtggctgggtcagatgccatgtacattaaccagtacgcgttgacggacgcggggtcgacgcgggaattccggcccgaaaccgcgg

SEQ ID NO: 8350 - DNA, 1999 bp, Glycine max
aaattttacgtatttataagcgctcgcaaagcagtgaagacttgagagagggagagagagaatccaaattcggatttttgaaacgggatcgactccattcctcttcttcttcactgtcacacacactcacacactcctgtccatcgtttctccccactgattcacgaaaccctaatttttcgtggttcctcttctggggagcgaagatttagggttagattgagctgaggtggcagatgcagcagcatctcctctgagaaaaaaaatggaaggtggcaagagaattacggtgagccctcgaccttgctgcggccgcagaatcgttgccgcgaagaagagaccgcgtgcgaacgatggcttcgtcaacagcgtcaagaaactacagagacgcgaaatcagctccaagcgtgatcgcgctttcaccatgagcgacgctcaagagagattccggaatattcgcttgcaggaagaatatgatacgcatgatccgaaaggtccttcatctatggtgttgccgtttctgagaaaaagatcaaagattattgagattgtagcagcacgcgatattgtttttgctcttgcacaatcgggtgtttgtgcggcatttagccgagagaccaatcaacggatatgctttttgaatgtgagtcctgatgaagttataagaagtcagctacgtaggccccccccccactcacttatcacagtttctgtatatgcttcagacagttacagttctttgaagtgcagaagcacaaggattgaatatataaggaggggtacaccagatgctggctttgctctttttgaatccgagtctctgaagtggccaggttttgttgagtttgatgatgtaaatgggaaggtattaacgtactctgctcaagacagcatatacaaggtatttgacctgaaaaactatacgatgctgtactctatttcggataaaaatgtccaagagattaagatcagcccgggaatcatgttgttgatttatgctaaagcaagtagccatgtcccccttaaaatcctttcaatagaagatggtactattttgaagtcattcagtcatctcctttatcggaataagaaggtagattttattgaacagttcaacgaaaagctacttgtaaagcaagaaaacgagaacctccaaattcttgatgtgcggacttttgaacatacagaagtttgcagaagtgaatttatgacaccgtctgcatttatttttctatatgagaaccaattgttcctgacatttcgaaatcgaactgtggctgtgtggaacttccgtggagagctggtaacttcttttgaggatcacctcttgtggcatcctgactgcaacaccaacaatatatatataaccagtgaccaggatcttatcatatcctactgtaaagctgattctgatgattcattgtctgaaggaaatgcaggttccatcaacgtcagcaacatcttaactggcaagtgtctggccaaaataagagcaagcaacagctttccagtggataacaattgcagttgcagtgacaaaccttctcgtagctattgttgtaattcaaagaagagaaaacatggctccaagatgaggagcacagttgcagaagctttggaagacattactgctctcttctatgatgaagagcgcaatgaaatctatacaggcaacaggcttgggctagttcatgtctggtctaactgatgaatgtagtattgaatttactgttgccctgtgttattcttattggattttcatagtgggtacattgattattctgatctgctattgagaacttttgggggatgtaactataagtgactttgaatcattcaattttttttccttgtcatttacgccttaggcgagtttgttctgtagttgtaagagttgtatgaaaatatgtcggtaactcaccggatgttgcttctgctgtaatctatattttacattaatggagcggcttcgatggaatgtagcatgtgaattatgcca

SEQ ID NO: 8351 - DNA, 2351 bp, Glycine max
gtttacccacgcgtccgtgcattgattgataagcaagggaatggttctgttagagtgcgaggtgagagttttgaaaggaagagggagaaaatggaatatgctgttgctcaacatccagggattggtagtgttcctaaggccatggaaggtgagcaggttgcagctggatggccctcatggctggcagcagtggctggagaggctatcaagggatggctgccacggcgtgcagattcttttgagaagttggataaaattggacagggaacttatagcaatgtttatagagctcgtgatcttgaacaaagaaaggttgttgctttgaaaaaagtgagatttgataatcttgagcctgagagtgttcgcttcatggctagggaaattcacattctacgtaggcttgatcatccaaatgtcataaaactggaaggcttggttacatcaaggatgtcttgcagcttataccttgtttttgagtacatggagcatgacttggctgggcttgcatcacatcctgggctgaagtttacagaagcacaggttaaatgttacatgcaacaacttttacgcggacttgatcactgccgcagctgtggtgtacttcaccgtgacattaagggttccaatcttttgattgataacagtgggatattgaaaattgcagactttggtttggcaagcttttttgatcccaatcaagctcagccactgacaagccgagttgtcactctttggtataggccaccagagcttttgcttggagccacttattatggcactgctgtggatttatggagtacaggttgcatacttgctgagctgtatgcaggcaagcctataatgcctggaagaactgaggtggagcaattgcataaaatttttaaactttgtggttcaccttctgaggactattggagaaaatcaaagttgcctcatgcaacaatatttaagcctcaacaaccctataggcgatgtgtttctgaaacgttcaaggagtttcctgcacctgcaatagaattgatagagatccttttgtccatagatcctgctgatcgtggaacctcagcatctgctttgaatagtgagttcttctcaaccaagcctctaccttgtgatccctcaagcttaccaaagtatcctcctagcaaagaatttgatgccaaagttcgggatgaagaagctagaagacaaggagcagcaggaagcaagggccagagacatgatcttgagagaagaggtgctagagaatcacgagccattcctgcacctgatgccaatgctgaactggtcttgtcaatgcagaagagacaagggcaggccaattctcagagcaagagtgagaagtttaaccctcatcccgaagaagttgcttctgggtttcccattgatccccctagaccatcacaggctgcaggattaattgcagatcccccggttcatcaacataaaagagcctcccattcaggtccactgacccaccgtgcggcatgggctaaaaagccgggaagaaccaggaagatgctccaaagatttcaatggggggtgacttatcaacagtatcgggcttagttgcagcaaggaggagtatgttgtctgacgatcgcagagaatggtctggatcatcacaagcagaggccccaaaactaataagcaggttcccaggatccttcaaggaggcttctgagtcaatgatgcaacaggatcagaagcatcatgcacatgctcctcaaaaggaagaggggagaggcagccgcaacaaagactcaaatcttgttggttatggctccaagggtcataaaattcattattctggtcctctgctagttccatcaagcaaccatgaccagatgttgaaggaccacgaccgccaaatccaagaggcggttcgaagagcacgactagacaaggcaaagatgagaagactccaagctgaagggagccagatatccaattcattatttgtttctggtcgttgagttatagaacccgatgctgcaaagcatcattaagaatatttgattcttttattttgcctgtacagggagttagcatcccccctgtggccatgttaggtaactctaactcagaaatcttccctccactttatcacagcacgtgtattttccttccacttatatggtcattcttgcaaagcttatcaaccttaagctgtagtagaatactgggggaccttgtcttccttgtgtttaacttatgatagagtaattatcactgggaagatggatatgtatatttgtgtactctctttttgtcacttgccccatgtctccgagatgcattttggtacgtcagtacatgattgaatatagccacttgtcatgtggtaaaaa

SEQ ID NO: 8352 - DNA, 1069 bp, Glycine max
gcgcgttgctcacctacgtattcggcgcgaggtgaaacgacgctaaaaaaacaaaagaaaggcacagccgaaaaacgaaagacagatcgtgtaaactctcattctcaaaaaaatacctttgaagtccaccgtcgtgtaaccctagcataccaccctgccgtcaacggtcatcactctccgtccaccgtcgcagtcggagcagccaccaggtccgtcgaagctcgtactctgaagtctgttcttcacttcttcccctctgtacttgatttctcagaaaggagtttagggagaaaccttggcaagtagaaaattagaattttaaatggccatgagaggaggaaggaagaatttgaagagggcaacagaggaaaaacatataacccttcaagatggccaaggcatcatgcaggtcgtgtctcttcgaggtgctaatatcattgaggtcatggatgcaagtggcaacaaattgctagctctattccctgctaaaattcagaaaagcatgtggattaaacgagggagctttgttgttgttgatgaaagtggaaaggaaaaggctcttgaatcgggtagcaaggttgcatgccttgtttctcaagttcttttctcaaaacaagttcgagaactagagaaatctccagaatggcctgaaagttttaaatctgcaatggtagatgattcaatagaaagtacaacctcccaacaagagcatgagctggaggggagtgatgatgatggactacctccattggaagccaatacaaacaggataagacctgctgagttgcaagctgatgatgaagattcagaatccagttcagatacagatgatgattgaaccatatagttaggctttcatgcctgcatatgaattattacattcaagctaaaccgacaatgtatgttatagaatgttcttgtcctatctttatgtgttgattctgctgaacatttgtgtttcagctctctcaactaaaagagtgtttcagtctcattttctttcctttttttggggggaggagaatattggttcgaattctctcagtttatattttattaacttaatgag

SEQ ID NO: 8353 - DNA, 1379 bp, Glycine max
ggcacacgtcagatggtcacggtccacatcctggaaacttgaagccgtttgacattacgacataccaatccgcagagactccaatttccggttgccacctcaccggtgatggctataggcgtagcagtttccggtatgtacacgctcactccaactctctcttcattcaagcaccccacgcgcctcttctcacgcgctgctttcactgcaaagcttccacttcaatttcgagcttcttcaacgtccttcatcgacaccgaaaccaatccaagagaatccaacgtagtagtagttgaaaaggacgtaagcagtagaagcagcaattcgttggcttgtcccgtatgttacgattccttgacatggaacggtgatcctggtttctccgtagatactatcactggatctagttttcaatgcagcacctgtcagaaaacatatattggtaaccaaacgcatctcgatctcaccgctacaggtggagctaagagctatggtgaatcgatgccagcttccacagagcttttcagggtgccattgatatcatttctctatgagaggggctggcgtcaaaccttttctgtgtggggtggttttcctggtcctgagaaagagtttgaattgatgaagggtttcttaaagccaatattgggaggaaatatcattgatgctagttgtgcaagtggattattttcaagattatttgcaaaaagtggactgttttctttcattgttgctctagactactcagaaaacatgttgcagcaatgttatgaattcattcagcaggaagagaactttccaaaagagaacttcatcttggttagagcagacatatctaggctcccctttgtttccagttctgttgatgctgtacatgcaggcgcagctctccactgttggccttcaccattagctgctgtagctgaaataagtcgtgttttacgacctggaggtgtatttgtcgcaaccacttacatacttgatgggcctttttctgttatcccatttttaagttccctgcggcagaatgtaaggcaagtgtctgggagctacatctttctctctgaacgtgaacttgaagatctctgcagggcatgtgggctagttggatttaaatgcattagaaatgggctttttgtgatgatctctgctacaaagcccagttaaggtttgagtttcctggtgctctctttgctgccttctaaacacattttgctgaagcctacatttctttacttaatcattttgaatcgttagcagataaaaatgctgcatgttgatctgttcaaatttgtagtttgacttggtaatataaagtaggcttcacttagagaaatgatatttatacataaatttctgcatcaaaaaaaaaaaaaaaa

SEQ ID NO: 8354 - DNA, 779 bp, Glycine max
  misc_feature (764)..(764): n is a, c, g, or t
cattcaattcgcaatatctcctccaactccttgacgctatctgcagcagaatcgttcattaattcattcattcgacaaaaccttgagcaattgacgatgatgcagatcagctccaccgtaccagcccacaaccttcacaagttccaagcaataaggtgccccagcttcagcttcagatgccaacaagcttcctcttccacctttcagaagcccttcatctccaccgagtcaactcgcttgcacctcgccaacctccacaaactcctcgagacccagaagcccgaggtccctccacccacccaaatccaacaccaccagccaatcattaacgatccaaaggaaaagaaaggaagaagctttctggagggtctcaacttggccaggctatggccggagatgaaagccaccgatgaaatgtccccgcgccacctcaaacgcctccagcgcctcctctccatgacggcggagtattccccgaggaacatcctcggcggccgctggagagaataccacggcagcaacgactggaaagggatgttggaccctctcgacgagaatcttcggcgagaggtcgtccgctacggcgaattcgtccaagccgcgtataagcctttcattcagaccccgcatgtcaacggaggagccgcacacacccacacgtggactttccgatagatcctacgaatgaccaaaagcctttacgccacgtcattcattgggttaccccaaatgggtagatgacctggcaccggatctaggatggntgacccaacgatcaa

SEQ ID NO: 8355 - DNA, 934 bp, Glycine max
tttttttttttttttcgtaaaactcaagcaataaggattatttgaatatgttgacctcaattctcgcatgaatccagatatgcgaggtcacacctacactctgtacattgtacaagtcactactttaatacatataatcaaacaatcaatatcatgtcttaaaatgcatacatttcaaacaattaagattggaacaacgaacataggaagcaagttatctaaaatcattcagcctttctttggcattgctgcaagtctcgtgtacattcttgccatggattgataccctctaacatcgcctgaacgcagaagatttcctgaatcacaattcagtgggctgtcaggttctggatgggccatcaaggcaattatagccctacagacagattgaagcgtccaagccgggctccaagcatttttcaagatatctaggcaaatctctccagtcttaaaatgcacattagggtgaaatattttagtcaaaaaccggacttgaggtggctgtagaggatactgctccggaacagaaaaggcaagctggaacacaccaccctcaaaaggagtctcagagggtcccttgataagagcggtccatttaaaaatgtttgaatcatcacaaactagttgaatatcaggatcaacggccttttcccgctgcacctctttgtactctttgaacaaccttgcccgcgatgcctgcatcctggatatgcgcaaccttgaaaacaatttaacgtgtcgcacgaatctgttgatcgatatctctggatttcgcgagtggaaagaattgggacaattatggatcggaaatgaaaagtgtgcaaacaaaccctaaaacagtggacccaccaagaagtctttagttaccaacaccgatggtgggaactaatcagtaatatttccacaagagattagatcgtcctgatcagaaatt

SEQ ID NO: 8356 - DNA, 1677 bp, Glycine max
ggctcgagttgtgctgagagagataatttcacattcttttgggatctcctgcctagcccccccccccaaaaggttggccgagtcaaatgccgctggcaagagaaacgatgggaagtctatggcgctgaaatggaaaggtagctccagtggtaaagcaggaaatggttttatgcctctggttgaagattggcaagagacaggaacctttacatttgctttggaaagagtagaatcgtggatcttttctcggatagtggagtcagtgtggtggcaggctttgactccctacatgcagtctccagttgggaactcttcaaataaatccattgggaagctgatgggacctgctcttggtgatcacaatcaaggaaacttttccatcaatctctggagaaatgctttccaagatgcttttcaacgactctgtcctgttcgagcaggagggcatgagtgtggttgtttgcctgtattggctagaatggtcatggaacaatgcatagctagactagatgttgctatgttcaatgctcttcttcgggagtcggcccttgatatcccgactgatcctatatcagaccctattgtggattcaaaggttttgccaattccagctggagatttaagctttgggtctggtgcacagctaaaaaattctgttggcaattggtctagattgcttactgacatgtttggcattgatgctgaagattgtctgctgcaagaagatcaggagaacagtgagaatgatgaaaagcagggcagagacagtgaacctaaaccttttgttctccttaatgacttgagtgaccttctgatgctacctaaagacatgcttatagatagaaatatcagacatgaggtgtgtccaaccatcaatctttcattgattatacgggttctctgtaacttcactccggatgagttctgtccagatcctgttccaggaactgtcttggaggccctgaatgcagagactattatagagcgaagattgtcagcagaatctgcaagaagctttccctatgtggctgagcccgttgtgtatatggctccctcttctgctaatgtggcagagaaagttgcagaggctgcaggaaagtctcacttggcaagaaatgtatcagctgttcaaagaagaggatataccagtgatgaggagctagaggaactagattcccctcttacattcatcattgataagcttccttcatctccaactgtcactgaaaatggaaaaggtaataatcataaagagcaaggtggcaaccccaccacaaatgctagataccaactcctacgtgaagtttggtccatgtaaaccttgtcagttccacatgtttacacctaccaagggaaaaatgaatactacgttagagatttggctgcaaagaattgtgaattgaaagaaaattaaaaagaaatggaatagaaagattttagatattgagagaatcttcaccaatagcagagcttaagcttgcagatttatttttttgtatataaaaataagtcattatagtgtagcattaaaaaatttgttatgttcaatgtttacatctttgtgtctgctttataattagaatgcaagatatatttgtaatagaaattttagtatttatttgttgttaattgtatacaaattctttatagtttacaaagcttacgtatttgaatgct

SEQ ID NO: 8357 - DNA, 1865 bp, Glycine max
gttaaatcaggaatcaaacgttgatatctgatgagcccgctttcaattttgctgaagagttgttcagtcctgttttgctcctcttccttgtcttctccaaacattcacacattaacgtttgaatcctctgatctgagacttcgtccattttcctaaacctctaattaagccaccaattagaagaggcaattttctcacgtcagagagagatcatctttgtatcagtgctgcatccactctcagatgggtatagtgaggggggtgttattggatgaatcagtactcttggctgaaagtggtgatgataaaactgtttctttactccggccaggagctgagtctctcatccgaacactcttcctgtccagaacgcatagtggaatttcttatggtgttggccttccagatgacaaggcaagtgttcttcaaaaaattgctagtttgtactcacttgattgcttcatcttaaatgattctgtaagtgaggttatgcctggatggagtaatactgatgatggcagcattattatttatctgatttctgataagaaggagttcttacctaaattaagcagctataattggctggttgttgttctaaatgttggaggtgaaagcttatgtcacaatccaaatatacttcagattgaaaacttagaggagtttccattgaccatatgccacttaaataaaagatcaattggaaccaatgctgtgactgtgagttatacaatgaagccttctcgtgtcgaagattttgcaaagaggggtgcatttcctttgtgtcctactcaaaatgggttgatgtttgtgcctctcgcatccaagctgcctttatcatctcaattaaagggtgttgacatagttctccacaaagccactgatgaaatattatcaattgaagataataatattacttttacacagaacatccaagcattgcaaagatacttggatcagcaccaggatttctgtgttattgatccactgagtaatgtttatcctttattggataggctagaaattcaacaagttctacttggcttagtagaactgaacactgaaggcaaatatttgatcagaggggcccattttcttaaggctgataactttgatgaatttgattttgcaactggactagctgaagctagattgtctcttccatgtatagtgaaacctaaggttgcttgtggtgtcagtgatgcacataagatggcaattgttttcaaagttgatgattttaagaatttaagtgttcctcttccagctgttattcaggaatatgtggatcattcatccactttgtacaaattttatgtcttgggtgaaaagattttctatgctgtcaagaagtcaataccaaatgctgatattttgaggaaatcatctaatggtgatgagctcaaacctctactgtttgatagcttaaaatctatgccgaccgctgacagtatcacaagtaatgagcctattgaccttaagctggttacagatgctgcaaattggcttaggagaaggcttcagcttaccatctttggttttgatgttgtaattcaggaaggtactcatgaccatgtaattgtggatgtaaactatctcccatcatttaaggaggtgcctgatgacatctctattcctgccttttgggatgccattagaaataagtttgactctagggtatctaaataagcatttgtttgaactttgtgactatttgacatgtaataatgccgatggttacatagatcaggcactagatgatatcaagctaaatatgagtttgaataactcattattgcatacttgaggtttgaaatgcttaacacttgttattaatgcaatttagtgttatttttcttctgcta

SEQ ID NO: 8358 - DNA, 1587 bp, Glycine max
ccgggcccccccacgccgcttgtgccaaaaatcacaacccccaattcttccccctccacccacccagcatatctctctattcctatttattagcacccctcacattaccttgtgtcaccaactactttgactcctttaccataccattacaataattatcaaacctaaccagtaaaaatggtgaccgtggaggaaatccgcaacgctcagcgttcccatggacccgccaccatcttggccttcggcaccgccacgccgtccaactgcgtctcccaagccgattaccctgactactacttccgcattaccaacagcgaacacatgactgatctcaaagaaaagttcaagcgcatgtgtgaaaagtccatgataaagaagcgatacatgcacctgacggaggagtttctgaaagagaacccgaacatgtgcgagtacatggcgccatcgctggacgtgagacaagacgtagtggtgatggaggtgccgaagctgggaaaacaagccgcaacgaaagcgattaaggagtggggtcaaccaaagtcaaagatcacacaccttgtgttctgcaccacttcaggcgtggacatgcccggagcagattaccagctcacgaagcttctcggcctgaggccctccgtgaagcgcctcatgatgtatcagcagggctgcttcgccggcggcaccgtactccgcctcgcgaaggacctcgccgagaacaacaagggtgcgagggtgctcgttgtctgctccgagataaccgccgtgacgttccgcggcccctcggacacgcacctcgactcgctcgtgggacaggcactgttcggagatggcgccgcagcgttgatcatcggatcagaccccgacccagcagtggagcggccgatattcgagatgatatcggccgcccagacaatcctgcccgactctgacggtgctatagatgggcaccttcgggaggtgggactcacgttccacctcttgaaagatgtgcccgggatcatctcgaagaacattgagaagagtcttgttgaagcttttgagcccatcgggatcagcgactggaactctatcttctggatcgcacatcccggtggtcccgcgatcctcgatcaagtcgaggagaagctccggctcaagccggagaaactccagtccacccggcatgtgctgagtgagtacggaaacatgtcaagcgcgtgtgttttgttcattctggatgaaatgaggaagaagtctaaggaggaagggaagagtaccactggagaagggttagagtggggggtgctattcggattcgggccgggtctaaccgttgagaccgttgttcttcacagtgttcccttggagggataaatcatgctgatgcggtgactagtgatttaagagtgatcaataaggaaccctcggaaataccagggaaagtttgttattattactagtttcacttgtggatttatcgtagcataatgttgtacaagaataatttaatatgaacaagatcgtgtgtttgttattgattttttcaaagttatatagtccgtacttattcggcattgcatttcatttcccaaaaaaaaaaaaaaaaaa

SEQ ID NO: 8359 - DNA, 812 bp, Glycine max
ggctcgagggcacgttgacatcggactcatcccacgcggccggattcttcctgcccagagacgaaaccataatccgtagagcattaataaacatttcccatttgtttggttgctccgaaaacagaggaccaaacaagcccttatcacaactctatctaacaaattacataggacaggcccaaaaccaaaaaaagcttctttgtctctcgtgccgattctccaccactattcccttcaccccaatcacactttccggtagttgttgctattagtgtagaagatgagtacgctggatgcaacaagggctgaacttggtcttcttgttttatatttgggcaaggctgaagcaagggacaaaatatgcagggcaatacaatatggttccaaatttttgagtaatggggaacctggtactgctcagaatgtagacaaaacaaccagcttggcacgaaaagtcttccgtctctttaagtttgtcaatgacctacatgctttgataagtccaacaccacaggggacacccctccccctagctctgttgggaaagtccaagaatgctctactctccactttcttgtttcttgatcaatttgtgtggcttggcagaacaggcatctaccagaataaagagcgcaccgaactaattggccggatatctctttactgttggttgggatcctcggtgtgtgccaccttggttgagcttggggagcttggaagactctctgcatcaatgaagaagttagagaaagatctcaagaacaagaataaatacgatgatgagcaataccgtgccaaactaaacaagtcaa

SEQ ID NO: 8360 - DNA, 1231 bp, Glycine max
cgaaaacagaggaccaaacaagcccttatcacaactctatctaacaaattacataggacaggcccaaaaccaaaaaaagcttctttgtctctcgtgccgattctccaccacaattcccttcaccccaatcacactttccggtagttgttgcttgagattgtaaagttgcaaactttgaaggtggggattgcgggctttgcccctcgcccaacctaattggtacttgcaattagtgtagaagatgagtacgttggatgcaacaagggctgaacttggtcttcttgttttatatttgggcaaggctgaagcaagggacaaaatatgcagggcaatacaatatggttccaaatttttgagtaacggggaacctggtactgctcagaatgtcgacaaaacaaccagcttggcacgaaaagtcttccgtctttttaagtttgtcaatgacctacatgctttgataagtccaacaccacagggcactcccctccccctaattctgttgggaaagtccaagaatgcactactctccactttcttgtttcttgatcaatttgtgtggcttggcagaacaggcatctaccaggttggaaataataaaatctatatttttctttagcatcatgtttgtttctgtattattatattgaaataccatatagtggtacaagagttttgtgtttaattacagaataaagagcgcactgaactaattggccggatatctctttactgttggctgggttcctcagtgtgtaccaccttagttgagccttggggaggcttggaaggctttcttcttcaatgaagaagttagagaaagatcttcaagaaccagaataaatatgataatgagcaataccgtgccaaactaaacaagtcaaatgaagagaacttcttatcaacttttcaaagcaaggaattgaatccagtggtaagcaagttggactgcttcaattggcacccaaagacaagttcttcctcgcgtgactggggcattttggatttgtttcgtctctaataatcttgttataagttgcttccttgccccacccaatccaaactttgtgaaatgtggaagaataaatggttccatgaagtgtcattgttgtcaataataatataattggtaggaaatgtcggttgatgtgagcattgaccaattttatcatagttacaagttctaaaaactgctgtgtagggtatcttttatttttggtctttcaaaaatatg

SEQ ID NO: 8361 - DNA, 1204 bp, Glycine max
caaacaagcccttatctcagctacgtacggcccccccccccaggacaggcccaaaaccaaaaaaaagcctcgtctctcgtgccgattctccaggacaattcccttcacccaacctaattggtacttgcaattagtgtagaagatgagtacgttggatgcaacaagggctgaacttggtcttcttgttttatatttgggcaaggctgaagcaagggacaaaatatgcagggcaatacaatatggttccaaatttttgagtaacggggaacctggtactgctcagaatgtcgacaaaacaaccagcttggcacgaaaagtcttccgtctttttaagtttgtcaatgacctacatgctttgataagtccaacaccacagggcactcccctccccctaattctgttgggaaagtccaagaatgcactactctccactttcttgtttcttgatcaatttgtgtggcttggcagaacaggcatctaccagaataaagagcgcactgaactaattggccggatatctctttactgttggctgggttcctcagtgtgtaccaccttagttgagcttggggagcttggaaggctttcttcatcaatgaagaagttagagaaagatctcaagaacaagaataaatatgataatgagcaataccgtgccaaactaaacaagtcaaatgagagaactctatcacttatcaaagcaggaattgatacagtggtagcagttggactgcttcaattggcacccaagacagttactcctcgcgtgactggggcatttggatttgtttcgtctctaatatcttgttatcagttgcttcctgccccagccaagtccaaaactttgtgaagtgtggaagaataaaatggttcccatgaggtgtcattgttgtcaaataattatatgaattggtcaggaaatgtcggttgatgtgagcattgaccaattttcatcatagttacaagttctcaaaaactgctgtgtagggtatctttctattttggtctttcaaaatatatgcaacaatattatgttgctccataatttacaaatacatgaatttgtaccctaaaagacatgcaatatcaaatcggttcccccacttcccctcaatgttcgtttcaaaaaaaaaaaaaaaaaagccttcaaataacttcatattgatccttggaagacaaaattggatgcgttgatttatcatta

SEQ ID NO: 8362 - DNA, 1028 bp, Glycine max
cagcgcgcaaatgaaagtagctgattggactttgggtccgtttgttccttcgctttgtttgcttcagatatttttcttttttacgttttttctgttgcttcatcccaaacagagatatttcggtaaccaaacattttctcttccccaccaaaacagaacaaacacgttcgtctcgtttcgttcccatggcggtctccgtttccgcgtcctccgcgattgcttctttgaactccgaacgctccacgcgcttggcaccctcactcgtctccgcatcttcttccgccaagcaatcctcgctgcaattcacgtcgcccacgcgccttcttcggattagtactccacgcgctcccgctccttcgcgacctcgattccttcctctggttcaagcgaagaaacaaacctataactcgtttgaagatttgcttgccaattctgaaaagcctgtgttggttgacttctatgcaacctggtgtggtccttgtcaattcatggttcccatactcaatgaagttagcactcggcttcaggataagatacaggtggtgaagattgatactgagaagtatccaaccattgctgacaaatacagaattgaggcgttgccgactttcatcatgtttaaggatggagatccttatgatcgctttgagggagcattgactgcagatcagctcattgaacgcattgaagctggcctcaaggttaagcaataaccctactataatgaagacacagaagcttgtctattggaatgttcgatcacatacatgatatgattgactggaatcacttgttgtttcaacatcattcagacattttttgaagagattaatgtatctcaaaatgcatagattcagccctaaaatatttgttgtttacttattagcagtggcattttttttttaaagaaatcacgactaaacctagttgtgtttgtgagttccttgaacgagctaattcttgtctcttcttttgactcgttccactttatctattttcattttctgaggtttagaagcaaaaaaaaa

SEQ ID NO: 8363 - DNA, 1019 bp, Glycine max
agtcagagagcaaagtaaagcagccgcgccgccaccttgtttcttttccgctagaacagaagaaacacgttcgtttcgtttcgttcccatggcggtctccgtttccgcgtcctccgcgattgcttctttgaactccgaactctccacgcgcttgccaccctcactcgcctccgcatcttcttccgccaagcaatcctttctgcaattcccgtcgtgcacgcgccttcttcggattagcactccacgcgctcccgctccatcgcgacctcgattccttcctctggttcaagcgaagaaacaaacctataactcgtttgacgatttgcttgccaattctgagaaacctgtgttggttgacttctatgcaacctggtgtggtccttgtcaatttatggttcccatactcaatgaagtaagcactcggcttaaggataagatacaggtggtgaagattgatactgagaagtatcctagcattgctgacaaatacagaattgaggccttgccgactttcatcatgtttaaggatggagaaccttatgatcgctttgagggagcattgactgcagatcagctcattgaacgcatagaagccggcctcaaggttaagcaataaccctactataatgaagacacaaagaagcttgtctattggaatgttcgatcacatacatgatatgattgactggaatcacttgtttcaacatcattcagacatttttgaagtgattaatgtatctcaaaatgcaaagattcagccctaaaatatttagtttaattagcagtggcattttttaaaaaaagaaatcacgactaaacctggttgagtttgtgagttccttgaacgagctaattcttgtctcttctttagactcggtcctctttatgaggttaaaaaacagtgcaagtattcagagagattaaagttggttattgtttgctaagcactggctgaattgcatgggaaatgattagtgccatttgaaaaacacataatttctgccgccgtgacactaata

SEQ ID NO: 8364 - DNA, 1371 bp, Glycine max
cgacccacgcgtataaatcgtcagcgagataggccagaacgcgaaagagaagaagatggatagtgaaattgaaaagaagaagaacctgttttcggaactaaccgacgacatcgttctgaacatcttctacaaactcgaagacgatcctcgccactgggctcgcttagcctgtgtctgcaccaaattctcttccctcgttagggatttctgttggaagaccaaatgctccctcaccatcccccaagacctcctctccgccgccgcctccgacccccctctctccctccacaaactctccttctgctgccccggcctccgccacgccggcctcctgttcgacacctccgatttcggcctcgaacgcgacctcggccccggcaacttcaacgtcatcaccgatgattctccttcgaacaccactccaccaccaccaccaccaccaccacaacaacaacaacaacaacctcctcaatccgatgattgttcttcctcttgttggtccctttacgatgacctctactacgacacgctctacgtcccaaccgagtccgagtcgccgcgattaacggaatccgttagcgtaagagcgggcgtggatgtggcttcgatcagcgcgtgcagcaagaagcgcaagctctcccgcgcgtggagctcacacctggcttcgggaagctggacactaagccgtgaacaaggaagcaagctcctggcgcgtaagttccggtacgattgcttgtacgtgtgcgagtggccagggtgcgtgcacaaggaggagaagcgcaagtactgcctcttcagaggggttttcaagaacttcaggcgaactatggtttggaggactattcaggatgggaagaagaggaagatggatctgccttgcgccttctgcgcgtgtgagttcacgtgggatctgcactcttccttttgcttgaggcctggctttggcttccatgacgatggggagcctatggttagggcttatgtttgtgagaatggacatgtctctggtgcctggaccgatcttcccatctacacttgaactctctactgcattttatgcctaatttatgtcattttcattttcgcaatcttagtttctcctttaaataactcctgagaaggccgctatacgctgttttcacattccattccattatttcaactattacttaagattggaaatctgctttgtgaaattccgatcgcagtgtgattgcagtggaaaagcctttttaggtttttcttttatgagattcaaaacccattcgcgtttagcattttttgttgttaagatacattttttttagagaaaaaaaaaattgttgtgttgttccaaaaaaaaaaaaaaaaaagcttatcgataccgtcgac

SEQ ID NO: 8365 - DNA, 1520 bp, Glycine max
cgggtcggcccaacccgtccgcccgcgtcagctacgtaggccccccccaaaacaaacaaagtcactcaaagatggacacaaagccctccacacctttgctttctcgaagtctcagctggtcttgtcccaattgcatccttttcttcaggccacaacaactccttctactgcctctctctagctagttccttcttcttcttcaaagattctgtactatataaaatcaaaggaagaaaagaggcctaattaagtagctttcagttgtggaatcatcatattgcagcgttgatggggcatttttcatctgcgttcaataggttggcaaagtcttttgcaacgaagaaagggaggagttctgatgaatgtaatggaagagaagcggcggtagcaatggcaaaggaagccaaaagaaatcacttcatgttgcatagctccggcacagttaatgttgatggttctaacaactttgcctcagttttctccaaaaaaggccagaaaggagtcaatcaggattgctgcatagtgtgggaagaatttggatgccaagaggacatgatcttctgcgggatttttgatgggcatgggccatggggtcactttgtggccaaaagagtacgaaaatcaatgccaacatctttgctatgcaactggcaggagacactttcccaatctccacttgattcagatgttgattttgatgtagagacagagaaaaaacaacaccggtttaacatgtggaagcattcatacttgaagacttgtgctgccattgatcgcgaactagagcagaatcgcaagatagattcattttacagtggaacaactgccttgtcaattgttagacagggtgaactcattatcattgcaaacgttggtgactctcgtgctgtgttagctacaacatcagatgatggaagtttggtaccagttcagctgacagtagatttcaagcccaatttacctcaggaagcagagagaatacttgagtccaatggacgagttttctgcttagacgacgagcccggggtgcacagggtgtggttgccggatgaggagtttccaggacttgccatgtcaagggcttttggtgactactgcgtcaaaaagtatggtcttatttcagtgcctgaggtaacacaaaggaacataaccagcaaagaccagtttgttgtgcttgccactgatggggtgtgggatgtaatctccaatcaagaagcggtggatattgtatcttcaacaccagacagaaccgactcgtccaaacgtttggtggagtgtgcaatgcgtgcatggaaacgcaagaggaggggcattgcaatggatgatatttcagctatttgtctcttctttcactcttcaccttcacttgaccaagttgccaccctagaagaatagaaacatttatcatgtaaaattgccgagtcaagtgcaacttgctgctcaatccatgtaaacatggtcctatatattaaggttgattcatcaaaaaaaaaaaaaaaaaaaaaaaaaaaaaaaaaaaa

SEQ ID NO: 8366 - DNA, 1576 bp, Glycine max
aattgtttgtttgtaaaaatgtctttgttttcgtctccttaggccatagtcactcatagataaaaaggaagtgaagaagagactagaaccaaacaaaagaaaggtccattatggattattatgatgatcttctctctacacctttgttttctcgaagtctcaacttgccttgtcggatttcccacctgttccggtcaccaaacctccttctctggtcactccctcagattcaccctctctagtctctagttcccaacaacaaactccaaggttccacactacataatacactttaacggggaaacaaaccagaaaaaagtgtcgtgtaggtaaacacattatggggcatttttcctcaatgttcaatgggttggcacggtctttttcaatgaagaaaggaagaaggaatgggaaatgtggggggagggaagctgctgaagcaatggcaaaggaagctaagaagaatgacatgatgttgtgtagctctggcattgttcatgtcgatggttcaaacaactttgcctccgttttctccaaaagaggccagaaaggagtgaaccaagattgctgcatggtgtgggaggaatttggatgccaagaggacatgatattttgtgggatatttgatgggcatggaccatggggtcactttgtggccaaaagaataagagagtcaatgccaccatctttgctatgcaactggcaggagacattagcccaaacttcaattgatcatccggctattgatgtagaggaagagaaaagtaaacattacagattcaacatatggaagcattcttacttgaagacttgtgctgccattgatcaagaactagagcaatatcgcaagatagactcgttttacagcggaacaactgccctatcaattgttagacagggtgaactcattgtcatagcaaatgttggcgactctcgtgctgtattggctacaacatcagatgatggaagtctggtaccagttcaactaacaatcgatttcaagccaaatttaccacaggaggcagagagaataattcagtgccaggggcgtgtgttctgcttagaggacgagccaggggtgcatagggtgtggttaccggatgaagagtctccgggactagccatgtctagggcctttggtgactactgcatcaaagggcatggtcttatttctgtgcctgaggtaacacacagaaatataactagtagagaccagtttgttgtgctagccactgatggggtttgggatgtaatctctaataaagaagcagtggatattgtatcttcagcagcagataaagctaaggcagctaaacgtttggtggagtgtgcggtgcatgcatggaaacgcaagagacggggcattgccgtggatgacatttcagctatttgtctcttctttcactcttcttccctttcaacagggcaagttagccaggttgccacattaaaatagattattatcgtgtaaaatgggctggtcgatcatgtcatacttgatgatgttggcttgatgtacctttggtccaattaacataagttgattaaaagtgcatggtaaatttgtttcttcctt

SEQ ID NO: 8367 - DNA, 972 bp, Glycine max
ataatctaaactacagatgtatgatgtatatctgggacaaaggctgcaagtgacacccccacttcgtaatgtcgcagtaggcctccatccctaggctagctaagctatctattctcaactataaatagcatccatctcctgccgctcgagccgattcggctcgcgactgaactcatctcactacattaatattcccttgggtttcattaattgtgacatttagctttttttattgaaccgtgtcaatggccgctactatgaaggctttagcttttgttgctttgcttgttaccattaatgcaatagtgtgtgaaagtagagtggcgagaaaggaccttggattggaccttggtggggtgggaattggggtgggtgctggggttggactaggccttggtggtgggggtggtgctggttctggtgcaggtgcaggctctggctctggctctggctcttcgtcatattcaagttctggctcctcttcttcttcatcagggtcaggctctggagcaggttctgaagctggttcctatgcaggatctcatgctggctcaggctcctctagagcgggttctgaagcaggttcatacgcagggtctcatgcaggatcaggatcatacggtggtaatggaaagtaattaattaaatgcatgccagttaaaccatatcaattatatgcatgctgtcctgtggagaaaagaacaagtcggtgtctttgttagttcactagaattatactttagtaagtaagcaaaaataagttgatgcatgtgttgtgtccatcctgttctttttcttttgtacaagtaggaatcgtgcttctccctgtgtccaatatgcaatagtttccttgaaaggtggttgaataataattaaatcatgtatacgtgtctgttactttgttattggtttatccagtgacaattctataatatatcaactatggcttttataagtaaaaaaaaaaaaaaa

SEQ ID NO: 8368 - DNA, 3264 bp, Glycine max
  misc_feature (1277)..(1277): n is a, c, g, or t
accacgcgctccgccttctctctctctctctcttaacacttcatcagcaaattcagaatacactgcagtgtataaacctttgcagagataatatatcccttctcagaccagttagttaagtaacggttttctcgtttacatattttctcattttcttcccaatttacccttgtttactgctcttcattttctctcttactgccatccactaggaaagttagcaaagctttttccaacttttttttttgagaaattaagagataggggaaaaatgataacctggggaagatttctaacacggtgatgtcggcggtgattccgctgtacgtggcgatgatcttagcgtacggctcggtgcggtggtggaagatattctcgccggaccaatgctccggcataaaccgcttcgtcgcgatcttcgccgttccgctcctttcgtttcacttcatctccttgaacaatccctacgcgatgaacttccggttcatcgctgcggacacgctccagaagatcatcatgctcttcgccctcgcaatctggacgaacttctccgccaacgggagcctggagtggatgattaccattttctccctctccacattgccgaacacgctcgtgatgggaatcccgctgctcatcgccatgtacggcgaatactccggcttattgatggtgcaggtgggtggtgcctgcagtgcatcatctggtacacgctcctcctcttcctcttcgagtaccgcggcgcgaagcttcttataatggaacagtttcctgaaaccgctgcttctatagtttctttcaaggttgattccgacgtcgtttcgctcgatggaagggattttctggaaacggatgccgaagtcggcgatgatgggaagcttcacgtgacggttaggaagtcgaatgcatctagaaggtcctttatgatgactccgcggccctctaacctcaccggcgcggagatttacagcctcagctcgtcgcgtaaccccacgccacgtggctccaacttcaaccacgcggatttttactccatgatggggtacgcgccgaggcattctaattttggtgccgcggatttgtactccgtgcagtccacgtcacgcggggtcacaccgcgcccctcgaacttcgaggagaacggtgcgcctgctgctgcaaccacgcagcagcagcagcaggccatcagctccccgaggtttcgggttctatcccgccgtgcagacagtgccggcggcatatccggctcccaatccggaattctcttcttccgggtntaacgaagagtgtgagcaagaattcgcagacacagcctcagcctcagcctcagccacagattcaagctcaagttgctcctcctcctcaacctcaagtagctcaacctaccaacagtgggaacaaagccaaccacgatgctaaggagcttcacatgtttgggtggagctccagcacgtcgccggtctccgaagccggcggcctccacgtgtttagtggggctgatttcggagcgtctgatcaatccggtcgctcataacaaggggccaaggagattaggatgttggttgctgatgaccaccctcaaaatggagaaaccaacaaagctgcagcagaaggagagtttggtggtgaagaattgaaatttccaggtaaagaaggagaacaagcagatgaagagggagaaaaagcaggacccggtggtttaaacaagcttggttcaagttcaacggcggagctacacccgaaatccgccgttgccgttgccggaaaacacatgcctccggcgagtgtgatgactcgtctcatactgattatggtgtggaggaagcttatccgcaaccccaacacttactctagcctcattggtgtcatatggtccctcgtggcgtttaggtggcatgtgcaaatgcccaaaataatagagaaatcaatctccatactgtctgatgctggtcttggaatggctatgttcagcttgggtctgttcatggctcttcaacctaagataattgcatgtgggaactctgttgcaacatttgccatggctgttcgattcctcacaggtcccgccgtcatggcagcagcttccatcgctgttggcctacgtggcaccctcttacgtgtagctattgttcaggctgcactaccacaagggattgttccatttgtgtttgctaaggagtacaacgtccacccagccattcttagtacagcggttatatttgggatgttgatagcactaccaattactctactctactacatattacttggtttgtaaaatatctatgcagtagtatagccaacataccaggacccaaatcaatgaatgaatgaatgaatgaccctttgaacctttttatactttgggagttaacatgcatgcctggtggtgaccacagtggattgattatgctgttattaataacaagggatgtggattttttctgagtggtgggagaagaacaacaaaaaccacaaactagtatatccttaaaagagaggagagatccttgattagagtttccagattttttggaatttcagaaaaaaaaatgacccaattggcccaaatccccataattctaatccccctatcaaaagtccaaaatacacgcagttttcaacagctgagagattgcaacaagtacctgaaatgggagacatagcagaggaaaacaggggaaaggctcacaatgaaatctagaaatggttccctccgtatctgcattgtaaatttttattaattagaaaaagtcatgtttgtgtcatcaaataacaaagatagcttagcaattgggtaggggtggaatataagcgaaatttttttttttgattattttttagttttgtttagtcatttgtttacttcaattattattattattattattattattattattattattattatatgggtgtttttgtctttgaccatccgcggatcccgcaattatttgcgtttgtcgtctttccttagtcacgttatttgtttagtattttttttaatctgatgaagtgaaaagagcaaaaagtcatcttcgttatttttctggcgtaaagaggggcagaccctgggataaagatgggaccatgagactgagagttgaactttcagaacatcgtcgtctactgagtggggattatgtacttttcctctgaagttgagtgatggttgttggaaagaaaaaatacatacaatttttctataaagaaaaaaaaaattgaagtagaattaagagcacaaaaatttattcagttggt

SEQ ID NO: 8369 - DNA, 951 bp, Glycine max
ttcgtacggctgcgagaagacgtcggaggggggcatcacaaactatatactaatctccatctaatagtgttaatttgtctttctctatctctatcggtcatgggtgcttttgcttttgatgaggaaaactcctccaccgtggctccggcaacactctacaaagctctgacaaaagatgctgacactatcatcccaaagattattggggccatccaaactattgaaatcgttgaaggaaatggaggacccggaaccgtcaagaagataacagctagtgaaggtgaccaaaccagtttcgtgctgcaaaaagtggatgcaattgacgaggctaacttggtatacgactacagcatagtgggagggacggggttgcatgaaagtttggagaaggttacattccaaacaaaggtggttcctggcactgatggtaatggctctatcgccaaggccactctcacattccacaccaaagacgatgcaccactctcagatgcagtgcgtgatgaaacaaaggccaggggtgctggaattttcaaggccattgagggctacgttttggcaaatcctgctcaatgattatccttcaaaccacttgcatgcatgcaataataattatataagcttatgatctggttgttggagttaatttgtatcatgtggctttgtttggtttaattaatttcctttgtgagcaagtgtcggttttatttatgtaacatttttaaagtgttactattataattcggtgaatttggttgagtatacgtatgaaaatgtgcgtgtgttggtgttgacgtgtttggtcatttgtattctgcagtaaatatattactataatggagaggaatcttaattagtaaaaaaaaaaaaaaaaaaaaaaaaaaaaaaaaaaaaaaaaaaaaaaaaaaaaaaaaaaaaaaaaaaaaaaaaaaaaaaaaaaaaaaaaaaaaa

SEQ ID NO: 8370 - DNA, 1328 bp, Glycine max
ggtttccgcatagtagcagcgcttagtggcgcagaaaaataaaacctaatttaccaaattcagacacagagattctcattcctcaagatcttctcatttcttgtctcaaattaatcctcaaacttgcctctctctgtctctctacaatgtgctccatttcctcactccaccaaaaccatgtctaaggatattgctaacatgaaggactcttggtttttcgacaataactttaatggtctgtcagatgagatttttgatgatgtcatcaacttttttgatttcccgctggaagacgtggatgctaatggtgtggaagaagactgggatgctcaattaaaatgccttgaagacccgcgttttgatgtttattcagcatcatcagctgggctgtgtgccgaaactcaaaatgagaagccccaacttggaatgaagttatctgcttctagtaatgggatttccccaataaaacagctggcaaaagctcctggaccagcatatggaaagaccattccccaccagaatgtcacttccaatggaaaagatttgcatcaattccaaacctacacctacagcccagtttcggtttttgaaagcagcagttcgtcctcagttgagaattccaactttgatcgacctgtcatcccagtaaagcgggctcgtagtaaacgtcagcgtccttcaagcttcagtcctctattttcaattcctttcatccttaattcgccggctatgcaaaatcatcaaaggatagcagctgctgactcagattttggaacaaatgttgctgggaatctatcaaacaaactaaaaaagcagaaaaaaaaggattcgtccctgctatcagatgatgttgagatgatgagatcctcatcaccggagtcaggttcccccagaaaatgcatgcattgtgaggtgacaaaaaccccacaatggagagagggacctgtgggtcccaaaacactgtgcaatgcttgtggtgttcgataccggtctggccgcctctttcctgaataccgaccggcagctagcccgacttttgtagcatcactgcactcaaactgtcacaagaaggttgtggagatgagaagcagagccatccaggagcctgttaggggttctatgttggcttcatcaaatctccatggaaatgctgtaggataatttttatgttggattgattacctttgaggaagaaacggtagtctgtagtcttaaacaggatccttcttgtttattgtttttcattatagtctaatgttatattgcttagcatcatttgtttaattaatgtaaattgattggtgaaataaaaaaaaaaaaaaaaaagc

SEQ ID NO: 8371 - DNA, 1681 bp, Glycine max
  misc_feature (1073)..(1073): n is a, c, g, or t
  misc_feature (1153)..(1153): n is a, c, g, or t
  misc_feature (1306)..(1306): n is a, c, g, or t
  misc_feature (1315)..(1315): n is a, c, g, or t
  misc_feature (1320)..(1320): n is a, c, g, or t
  misc_feature (1322)..(1324): n is a, c, g, or t
  misc_feature (1326)..(1327): n is a, c, g, or t
  misc_feature (1332)..(1332): n is a, c, g, or t
  misc_feature (1334)..(1334): n is a, c, g, or t
  misc_feature (1348)..(1348): n is a, c, g, or t
  misc_feature (1464)..(1464): n is a, c, g, or t
  misc_feature (1472)..(1472): n is a, c, g, or t
tcagctacgtaggccccccccatgtggattatgctgaattatatcttctataatttgttggaagccacttggattatcaagcttcttaactcaagcattggaagggaagctatagcacactcagaaaatcgatgagtcccatgaccatgatcacgaccacgaccacgatgtttctttagacatgtcaaggttcgatacctgctaaggttgcctagatttctgtgaagattctcgcatatacgtgcttacccttcatattatgttaacaattggtcagtgattccctgtggctaccagtgtgagatttgtcttgtgagttgagtttcgaccactgattttgatggagctgaaatcgttctcttcttgttctgcgtccacatctgaggttgtccatgttggaagatcctactccactttgttctccagtttcaggcacaaagttggagttagattttctacccacttcaagtgccgcagagggttgtttttgaggacttattgtgcctcggataacacttatttgacagataaagcattcattagttcagttggtcaagataattttgcagcagaaacgagttcccatcgaattaatggaacaaatggctcaatttcaagattctattccacaaatctgaaattacttgatgcctttgatgatgaatatgggggagttgttgttcatccagataggttaccatccaacccatatacctttgcatctgtgttgcgtttgtctctttctcagtggaaaaagatgggaaagaagggaatttggcttaagttgcctttagaccaatctgaccttgttccaattgctgtgaaggaaggcttccaataccaccatgcagagccaggatatgtgatgttaacatactggattcctgaaggacctagcatgcttccagcgaatgcatcacatcaagttggagttgggggatttgtcatcaatgacaacaatgaagtgcttgtagtacaagagagacattgttctccagcaactcttggtctttggaagataccaaccggattcattcttgaggcagaggaaatatatacaggagctgtaaganaagtgaaggaggaaactgggatcgatacagatttcattgaagtcatagcattcaggcatgcacataatgtggccttcganaagtcagatttgttcttcatctgcatgctaagacccctgtcatctaaggtcattgttgatgatcttgaaattgcagcagcaaagtggatgcccctggttgagtttgtagagcaaccactcatccaagatgactccatgttcaagaaaatcgtnaatatatgnattgntnnnanntgggnanggatattggggggntatcaactcatcaagtagtttcaaagtttgacggcatggtgtcttccttatactacaatgtcatcgacaatgaagataactgtgttggaaaatgaggactcgaacacgcaccactnttggcttntcaaatgtcagcaacaagctgaaagctgggctaaccactagtgcagatatccattgtgatatgtaaacatgcaaatgacaatttatccctatagttataatgtatataaatatctctgataacgttcgtgtggaacatgcttgatcatcacagttgttccacattttgacatttactaatgagtaatgattcttgcaaatagaacatta

SEQ ID NO: 8372 - DNA, 1613 bp, Glycine max
tcgagcagctacgtaggccccccccccgaaagcaacaacttcttctgtttcaacctcatcgtcatcgtactactactacccacgttctgctcctttgcggatcgtgtccgggtgacggttttcttgtagattatttgtttattaaatcgactcccttgttcgcccatacaaaagatggcagacaatgaggatggaagggataagactactcgtgggaatgaatgggaggttgtatctctgacagcatcgacatatgcagctgctcctggtcctgatgaagttgagatgaaggatgatgggaacgaagatgtatatggacaagatgaaggagaaacgtcacatgctttatttatgtctcgtcactttgtctttcctcccagtcagcatgaaaacttgcctgtggaacctgactatggtgagattcatgatgattctggagacaaagatgttgcctctgaagagactcctgaagaagtgaccataccaagtggaaaggatgaagaaaacttgacattaccaggattggaagtttcagaggagtttgagggcatgcggtattttgacgagaaaatcaacagattatctgttcgtggtaaacagtttgaggaaagtacaactctaccagcatttggtttgactgaaaagggggagagcatgtatgaccctgcaaaatacacttctttcgacagtgaaactgctattggtggcataacagcttatggtgaaagcatagttgatcctgaaacaactgaatcagcagagcaagggtcaaacgtatctcctgatctatcattgtcaaactactcttccaaagataatgaatacaactcctcagatcttccttgtggagcttggtggaagcggagagctgcctccttatatgctcatgcaaaagaggcaaatgcattctggtctgtcttcattgcagctgctgtgatgggtcttgtaatgcttggtcaacgctggcagcaggaaagagctttacaacttaaatggcaaatcagtataaatgatgaggcgaggagcagggtgcttgctcccatatatcgactcaaagatgtgattgttggtggcaaccgtcgtggctccttgatcaggggaagctcctctggtgaaagttaagggaaaggtggctcagtgcgtatgggctcctatccttgtggtaaaagtgaagatgatgacgaaaaaatgtatgtcagagagaggttgagaatgaaaagtgctacaattgtgaaatgcaggtttggtactaggattggttgacctttcccaattatgaatgccaatgttcaaacattttatgttatggattttcttctttgtattgattagcaatgtatagctcttgaagttattcaacttatgtattctgattgtgtgaaattggcagtttaaacacaaaaagatgtaaatgattgctttaaaaaaaaaaaaaaaaatttctttttactctaacggctgcagagtctcgctaatgggagtgaaacctcagtttctactttctgaagtgtagtagattgcatgctggcatgagcacatgcttatgaattattgatagatactgttcaataagggcatcacatacatgaaaacaactacacttgtgacctttt

SEQ ID NO: 8373 - DNA, 1112 bp, Glycine max
gggcgaggatggagtagagcaacattaatacagcaaggcagcactgtgtttggaaatgtgcatcttttcttgggcccaaatgcaataattgttgtcctgttttctaccgttgaggcttctttctatcagctaagctaagcagtccaaagggcacaacacaacagagaaagaaaagagtaagagtatgggaggctcatggtcatggcagctcacatgtgccctcttgctactcttctccgccgtagtcaccgccactgaccacattgtgggtgcgaatcgtggctggaaccctggctttaactacactctttgggccaacaaccacactttctatgttggcgatcttatctcattcaggtaccaaaagaaccaatacaatgtgtttgaggtgaaccaaactgggtatgacaactgcactacagaaggggcagtggggaattggagcagtgggaaggatttcataccccttaacaaggccaagagatattacttcatttgtggcaatggccaatgcttcagtggaatgaaggtttccgttgtggttcatcctcttcctcctcctcccacctctgcagttgctgctcaacattcatcgccaaagtctgcttctcctgtgctcttaaaacgaggatttcgctcactgttggtgtctactgtttcagcttgctttggaattgtttggatttatcacttgtagagcttagtggctcattctttttccccttgttgtttgtatctttcatgtttgtttcggattcttgcctttcaaaagcttgcttgttggtgctgaattgtttctccctgtggctgtgtctaggttcccctttataattcagcctataattgtgttcctgagtcttgttagatgcaaaacaaaggaaatgggaattttcaggacttttgtactgatatatttctgagtaaaatatgcttgtagtcttaaacaatgttaattattacgtcaaaaaaaaaagagttaactatagctcctactaaagtttaatgcatttgaatataaaatatatacttttagtttatgataaaaaaactaaaatcgtgtcacttttaataatgtataaagattaaacacgcattaagtgtttatagagaat

SEQ ID NO: 8374 - DNA, 4838 bp, Glycine max
ccacgcgtccgctttctcttcttttcgtgccgcccctcactctctttgtcaaaccatcaaagatacacatacccaataccataaacacacgttcagctcctcatagctcctgttaccattgttttgccccataaagtaaacaaaagaaagaaaacattgaaaatcccaattaccctttgttttcttttgtttctacaatcatatctgggattggattgatctgtgggatttattttgattcatgttgaggttttaattagggggagagttatcaaaggagagagtgagaggaagatgggatcagaaattggaatcaaaataaggaaaattgttgtcatttcaatcagaggtggttacagatcagtttgcaaccatccattccttgtgggggttttttgtttcctgattttgttgtacagatcttttccttttctgttttctgttttggtctctgcatctcctgttttggtctgcactgctattctgcttgggacccttctcagttttgggcagccaaatgtgcctgaagttgagatagaagagaaagttactcatgacatttcatccttccaagctgggttctccgagggtgacactgtttttgctgacagagatgagagctattttgtgaaggggtattcagaaaataggagtgatgtggaagagaggggcattgaggaggaagcaagtttggttagtgagagggataatagggccgaagaagatcgcggattgctttcttctgacatgcctccagatgatgaaaagttgccggatattattcagcccgagaagcaagaaaaagaggaagtggagagggaaatgaaattccatagttttgagttggggaagaatagggaaattcatgaagagaaccttaggtctgaagctttttcgagtgatgatgaagctattgagaaacaatatgtcatggttcaaaaagtggatgatgatgtatttgaatttgaaaatgagaaaagtcccggagatcatttggacttttctgccagctcatcttggaaacaggtggaaaacgacgatgacgaggatgactcggtggagtcaggttctgatggggctgagagctcttcaccagacgcttccatggctgacatcattccaatgcttgatgaactccatccactactagacctagatgctccacagccggctcatgtgtcccgtgatggttctgatgctgcatctgagaactctgagaaaagtgatgatgacagtgtcgaatcagacgatgatagtgaaaaccacggtgatgcggacgatgatggtattgatgagcctgatgatgaagaggaagaagaatcggcaggtggcaaagaggaggatgaaagtaaatctgctattaagtggacagaggatgaccaaaagaatctcatggatctgggaaatttagagctggaaaggaataaaagattggagaatcttattgctaggagaagagcacggagattgatgactgagaagaatctaatagacttagattgtgctgatattccctgtaatgttgcacctattgctatgaccagacataacccatttgattttcctgatgactcatatgctgccatgggattaccacccattcctggatctgctccgtctattctacagcctagacgaaacccttttgatattccctacgactcaaatgaagaaaaacctgatcttaagggggacagttttcaacaagagttcaaagtgtttcatcaaaaagaggccttttttcggcggcatgaaagtttcagcgtgggaccatcagtattggggttatccaagcaagagaggtatgattggaaacctgtctttatatctgaaaggatggcttcggagggaacaagctatccttcattccagaggcaatcaagtgaagttagtgattcaaagttaagttctgttccagatactgaatctgtgagttcaattgatcaggatgacaggaaattcagtgagcaagacttgtctcaagaaactgaatttatatctaacattgaccatgtttctgatgttgttgaacatggaagccaatcctctggagaaaatgattctgtggagatgatacaagttgaggagagcaatgcttgtcaggatgaaggggaaatagttctgggcggggtggaagatccttctgagatggtattctatcctgaaacaggagaggttgaaatccacgaacaattcaatgcaggggaaacacatttgagaagagaaccaagtcatgaggagagtgtcggcagcagcagatcaagccattcttcactatcggaagtaattgacagcataccagatgaaaacatggaaaaagcggaaaatttgcagcaaggagatgatcatctctctgaatctagaatttcaacacaagcttcagtggaggaatcaatcttccagcaagttagtggtgaggtggaagaaaatcaccatgtagaccctgtttatgatcttagtccacaagcttctgaaacactccaattgtttccttcaatatcttctcatgattctgctatggagttgtctgagagggcattgcctcctgcttcagtagaaatgactgctaatgcggcagaagaagagtccaaagtgcatgatcacagactggaaggtaatacttctgatcatgataaaactcaagcagcctcttccgaactacatgaggaagccaaaaatgaattgagttctgagaaatctgaagatgtgaataatgttactgcaaatgagttatctgcagttgccccaaattttgttgatcagaatggatctacaatggctgagccgcaggttgtccctgtttctgtggattcaaatttgtcttctgatattggatcaataaaggatgtgactaatttaggcttagttcatgggcaggatctagctgaccacatacgtgctgattctgaagttcttcaccaagacagtgtagattctccagattcagattatcaaatggcttctgaaaagtcacatctatcagataatgaatctgtggaggaagctgcactgcccaatgcagaatcaagatttgataatgcaaatatgtctacgccagtccaagatgcagatgaaatgtttgattctgcggcttctgatgcccaccatatttcttctaatggttcacctatggctgccccacgggatttagagctctcacctgcagcagggccatcaccagtggttcatcctgattcaccttctgaagaaactgaacatatagaaaaattttcatcaaataatgatgacatatttcagattcagcaaggtaaaaccaacatccaccaagatttggataagaatacggttgctttcacttcgggcagtcaacatgaaattgatgtgaagtctccctctaacttggagaatgatctgtcaagctctgataaatcagttgttgcacaatcttctagtgatcatgatgaaattcagagttctaatgctatccaggttgaatctgcacactgttttggcacttccaatgatgaagttggagaattgcatgatgcagttgacaaatttcctccaagcatttcttctgtgacctctgaaaaatttgagacccctaaattcaggtcacccactggtgaagcagatttggaagttgataggcacggggaagttgaaaatgaagaccaaaatgaagtgctagaaactgcgcttcattcagaagagagcatgtctcaggttactgaagaaaatagcaatgaagaatttgatgatatgaaggaaattgatgaagaattcttgtcagaattggacactgttggagactttagtgtcaatgatgctggtgtatcacttcatactggcattgaacatgagaaaattagagatgctcaacttagttcactccctaaggatgtaaagacagaagagtttgagcaggacatcccagttcttgaagcaagatcacttgaagatattaacttggcttttaagcaacttcaagaaggcgtggatgtcgaagaggtcatcaatcgaagtactattaaggatcagaatgtcggtggagaatctaaagatcatctggaaattaattcagaccttcaagttgttgaagccagatctctagaagatattaacattgctttaaaccaagtctctgaaggtaataaaggggagctgccaaattctttggattcgaaagacacttcagtcaaagtagaagaaaatgaggatggctcagccaaggtgaatgaattctttaacgtagcaaccagttctgaggaaatgagcagaactacagtggataaatcagaagatgtacctaatagcagctccggtatcgaggagaaatctcacagtaggaaatctagttccagctcgagctcaagtgattctgattgataccgaaaggccactttgagcaagaagaaagagttgtaagtttctcatttatgttttttatttaattttttcttcagtgatgggagtttgggtatctagccttggcaccaatcatgtcttggctaatggtagtcacaagtcaggtttctcaaattttgttggattggtttcttcaagaatgagtttttggttttatttcttgaagcgtgaagttttttgttcagttttatcccgcgagtgtgagtaatttgacagatataggttgagtgtttatttccaacaggtgcacattgtgtagtccaaaaagaacaaaagaaaaagaaattgaattattgtacattatactttgattgtagaaatggtgattggactttgtttgtgcaaaaaaaaaaaataaaaaaaaagcggccattcagactgtgaaactgcgaatggctcattaaatcagttatagtttgtttgatggtatcatacttacacatgcatgg

SEQ ID NO: 8375 - DNA, 1918 bp, Glycine max
gctaatcgtcactcgctcatccactggaggtttcgctctctcagtttcttttccccaaattgtttttcatctaacaatttactttgcagaaccctaaccctagccccttcgcctaccttgtaaccttcctttcgatccttcatctcgcagacaatgggtgaaactaaggacgaagcatacgaggaagagcttctcgattacgaggaggaagacgacaaggcccccgactccgccggagctaaagtcaacggcgaagctaccaagaagggctatgttggaattcacagttcgggatttagggacttccttctgaagccagagcttcttcgggctattgtggactcgggatttgagcatccatctgaaggtaatacttgtatcacaatcttgttttggagaactaaattgctttggtaacgcttgaaagcgtcagaaaaaggtttattttacttacactcggttccttgggccctgttttatttgcttcatcaccagtgcaacatgagtgcatacctcaagcaattctcgggatggatgtaatttgtcaagcaaaatctgggatgggaaagactgctgtttttgttctgtcgactctgcagcagattgatcctgttcctggccaagtttctgcacttgttctttgtcatacaagagaattagcataccagatatgccatgagttcgagaggtttagcacctacttgccagatctcaaggttgctgtcttttatggtggggtcaacatcaaagttcacaaggatctgctgaaaaatgagtgccctcatattgttgttggaacaccgggaagaatactggcattgaccagggataaggacctttctttaaagaatgttagacatttcatattggatgaatgcgacaagatgctggaatcattggatatgaggaaagatgttcaagacattttcaagatgactccccatgataagcaagttatgatgttctcagcaacactcagcaaggaaattcgcccagtctgcaagaaatttatgcaagatcctatggaaatttatgttgatgatgaggccaagttgacacttcacgggcttgtgcagcactacatcaaattgaaagaggaggaaaagaatcggaagttgaatgatcttcttgatgcactggactttaatcaagttgtgatcttcgtgaaaagtgttagcagagcagctgagctggacaaactacttgtggagtgcaactttccatctatatgcattcactctggcatgtcccaggaagaaaggttaaagcgctataaaggtttcaaggaggggcatacaaggattcttgttgcaacagatttggttggaagagggattgatattgaacgtgtcaacattgttataaactatgacatgcctgattccgcagacacatacttgcacagggttggtcgagctggaagatttggcaccaaaggccttgcaatcacatttgtttcttgttctactgatgtcgatgttctcaacaatgttcagtctaggtttgaggtggatataaagcagcttcctgagcagattgatacctctacctatatgccatcgtagatttttttgggagcaatgttagatgcttggtggcatgagtaatagtgacgcatggtaatttgaacggtgcagctggatgattaaccggtgctgatagacaccagagtctgtctacagactgccattttaccattggatatttatcggtattattagatagcagcagtgtaatggcttatgcatttatgtggtttcacttactgtatcctgtgtggcagctacgctgttttcatgaacgtcatgttttgagttagtcttactgcgactttgatacttgatacttctgttgaattcgatacgtggtcttcgatttaaatttcatagtttttacttctcgaaaaaaaaaaaaaaaa

SEQ ID NO: 8376 - DNA, 1246 bp, Glycine max
  misc_feature (27)..(27): n is a, c, g, or t
  misc_feature (72)..(72): n is a, c, g, or t
tcgagtcagctacgtaggccccccccnagtatgtactttttttctctccttggttcatgttggaagttgttntcatctctaatacatggtgtgtgtcaggtatgggctttttgctaggaatggtattaatttaatttaattagggggaagggtgtgagggcattttgggtttgtttctgccagttttcttagggtgtgagtgtcaagtgtcagtggcacttgcttggcgtgactaaaaaatgtttctgcaaggggacaaaacagatggaccagaactgtcgttcaagggatctacatccttcattcatttcgttgtggattccattagcttgaggaaggaccctaataccctaatatgatttactgtgaaatttgttcctttcagcctatggaaatttatgttgatgatgaggccaagttgacccttcacgggcttgtgcagcactacatcaaattgaaagaggaagaaaaaaaccggaagttgaatgatcttcttgatgcactggactttaatcaagttgtgatctttgtgaaaagtgttagcagagcagctgagctggacaaactacttgtggagtgcaactttccatctatatgcattcattctggcatgtcccaggaagaaaggttaaagcgctataaaggtttcaaggaggggcatacaaggattcttgttgcaacagatttggttggaagagggattgatattgaacgtgtcaacattgttataaactatgacatgcctgattctgctgacacatacttacacagggttggtcgagctggaagatttggcaccaaaggccttgcaatcacatttgtttcctgttctactgatgttgatgttctcaacaatgttcagtcaaggtttgaggtggatataaagcaacttcctgagcagatcgatacctctacctatatgccatcgtagaattttttgggaacaatgttaagtgcttggtggcatgagtaatcgtgacgcagaacggtgcagctgatgattaaccgtgctgatagataccagagtctgtttacagactaggccattttaccattggatatttatcggtattagatgtagcagcagtgtaatggcttatgtatttatgggttttcacttactgtattttgtgtggcacctacgctgttttcatgaacggtcatgttttgagttggtcttactgcgaccttgatatttgatgctttatacttttgttgaatttctatacgttgcctttgatttctt

SEQ ID NO: 8377 - DNA, 1092 bp, Glycine max
aaacctacattgatactttaagaatgaattaatcgggatattttactcttacgatctggctaagttgatttgtgcgacattccgggtctcgtctctctttgtttttttttttttttttttctaaaaaaaaggcttgtaagatttgttctctaattcatcaattttttagcttgaaacaatatatagtatccctttcgaacacagtacctcagaaatcacatatgggaaacaaatttaatggaaacccggagtaatggactgtgttttatctaagccagatatgcccacttgcttgaatcaaattttaaaagtttgggcacaaccaaagctagtttcaaggtgctgcctcctcatcgttatcagagtcttcatcacctgaggaatcttctttctcttgcagctgttctccagcatttaatttggtctttttctcctttttcctttgcttcttcttttgacgttttgctcgcttctttgccgtccgttcctcagccgcttttagtctttcctctcttctcaaattaaattctgccagctctttccttttctggtagtcgacttccatcctggcaagacgatcttgttccttgcgtctcatttgccgatactggtggaagtcgccggagcctgaaccggcggaactaccggaagtattgctaacacggacaggaacattgtcgataatccgtcggagcttgacttccagatcctcctcttcctctttgagagagaccggagtatattccactatcgcattcgatgctgctgccggcggaaggggaggctttgacgttcccggcgccgggaccatctgaaaatcaccgcctctgggtttgcccgtcgacattttggagatttaccaaaaccctagtttttcactttacacctgaatccctaattttacccacaaagttggttgagttgttttaagaccctaattctaaacccttgttcttcattcccttcgaattgcacgggacagcggcaatagcacaactgggtcggtttctctcccaatcacaaaatccgaatatgcctgcttcttgaattaggggcatttcacggggggggggcctacgtagctgaactcga

SEQ ID NO: 8378 - DNA, 1405 bp, Glycine max
cccacgcgtccgtactgctgcgagaagacgccacaagggggagagaaagtgagagagaattacagagcattttccaacacgattacacgaccgaatcaaacccctctttctctccgaagctgcttttaatatcgtactggccttcgattgttctcctctttaatacatactgttctctcttcgatttgagggaacagtacaagagtctgagcatcggttaacccaactgcacaggtagtctccaaataatggagcctcatgatgagactggatgccaggctcctgaacgccccattctttgcattaataattgtggcttctttggaagagcagctaccatgaacatgtgttccaagtgttacaaggacatgctgttgaagcaggagcaggacaaatttgcagcatcatccgttgaaaacattgtgaatggcagttccaatggcaatggaaagcaggctgtggctactggtgctgttgctgtacaagttgaagctgtggaggtcaagattgtctgtgctcagagttctgtggattcgtcctccggtgatagtttggagatgaaagccaagactggtcccagtagatgtgctacatgccggaaacgtgttggtttaactggtttcagctgcaaatgtggcaacctcttctgtgcaatgcatcgctattctgataaacatgattgcccttttgattataggactgttggtcaggatgccatagctaaagccaaccccataattaaggcagataagctcgacaaaatctaggcatgcactactgaaggttaatgtatgaaccttgaagcttcatcttctatatgtaagtttcatatatgttgtcttcctggttttttaggtgtcctttagtgattaaaatgatccaagtcaagatggcaagggcatcattagggaaaacatttattgttggttgggagatccacttgttagctccagtgtgtttgtgctgctttgatggacactttggctcattttgtaatttgatttcctgcttggtctgcatttttcttcctcattgcatgaaaagtatttcctgcgtagtcttgtattggttttgcttttgaatcattataggaatgtttaatttttaatgctcattgctcaaaatacacgcagcaagttcggatctactggcaggacttcgttattgatataattctcaatttattattgttattggcctatacgaatgagagaaccaattttctggaccaaaaagattgaatgaggacctgtggaccacccgcatagatccagagccctactagtagtgtagaaatgttatatgacttatgctatgaactaagtattgtttatatcgcattacctcgttgttttcatattctgcgtctgtctctaatgttattcaacaagtgatcaatgtgtca

SEQ ID NO: 8379 - DNA, 1134 bp, Glycine max
cggttaggaattcccggctcgacacgccccgaccccctcccgtccgcccaccggaaatggagagaaagagtgaggagagaattacagagcattttccaacacgattacacgaccgaatcaaaccctctctttctctccgaagctgcgtttaatatcttactcgccttagattgttcttctctttcattatactgttctcttttcgatttgagggaacagtacaagagtgtgaggatcggttaacccaactgcacaggtagtcactaaaataatggagtctcacgatgagactggatgccaggctcctgaacgccccattctttgcattaataattgtggcttctttggaagagcagctaccatgaacatgtgttccaagtgttacaaggacatgctgttgaagcaggagcaggacaattttgcagcatcgtcggttgaaaacattgtgaatggcagttccaatggcaatggggctgtgactactggtgctgttgatgtacaagttgaagctgtggaggtcaagactgtctctgctcagagttctgtagattcatcctccggtgagagtttggagatgaaagccaagaacagtcccagtagatgcgctacatgccggaaacgtgttgggttaactggtttcagctgcaaatgtggcaacctcttctgtgcaatgcatcgctattctgataaacatgaatgcccttttgattataggactgttggtcaggatgccatagctaaagccaacccgatagttaaggcagataagcttgacaaaatctagggatgcactagaatgaaggttgatgtatgaaccttgaagcttcatcttctatatgtaagtttcatatatgttgtcttcctgggtttttaggtgtcctttagtgattaaaatgatccatgtcaagatggcaagggcatcattagggaaaacatttattgtttgctgggagatccactattagctccagtgtgtttgtgctggtttgatgaacactttggctcattttgtaatttgattgcctgcttggtctgcattttttttccttcctcattgcattaatagtatttcctgctagtcttgtattgattttgcttttgaatcgtcatagtaatgttcgatttttaatgctc

SEQ ID NO: 8380 - DNA, 2404 bp, Glycine max
  misc_feature (2387)..(2388): n is a, c, g, or t
  misc_feature (2393)..(2394): n is a, c, g, or t
ccacgcgtccggtttgttgcatccacgtcactctctctatctgaaagcccacccgtccgggaaaagcggcgccgctgagttggtatatatccgagacgccaccacagtgagtgtttgcgtcactgaaactgaatattcaacttcagcacactctctctatctagggtttttccatggccaccgtgatccgcaatcctatcctctttccctccacctctcaccgccccaaccaaaaccacagcaacaacacattcctcattttccgcttccctcaaacctcacgctcttctctccactccaaatcccgattcgccttttcctgctcccaatcggagcctcctcctccttctccttctgcttctcctcgacggcgtcctccgtacatcccgaaccgcattcctgacccttcctatgtccgcattttcgacaccactctccgcgacggcgagcagtccccgggcgcctccatgacctccaaggagaagctggatgtggcgcggcagcttgccaagctcggcgtcgacatcatcgaggccggcttccctgccgcctccaaggatgacttcgaggccgtcaaaatgatcgcccaagaggtcggcaacgccgttgacgacgacggatacgtccccgtcatctgtggcctctcccgctgcaacgagaaggacattcgaacagcctgggaggccgtcaagtacgccaagaggcccaggattcacaccttcatcgccaccagcgccattcacatggagtacaagttgagaatgtccaaagacaaggtcgtcgacattgcccgcaatatggtcaagttcgctcgcagtttgggctgcgatgacgtcgagttcagtcctgaagatgctggaaggtcggatagggagtttctttatgaaattcttggagaagttattaaggtcggcgccaccacgctcaacatacctgacactgttggtataaccatgcccagtgaatttggaaagttgattgctgatattaaagctaatacccctggaattgaaaatgttattatttccacccactgccagaatgatcttggactttctactgcaaacactatagagggtgcgcgtgccggtgcaaggcaactggaagtgacgattaatgggattggtgaaagggctggaaatgcctccctagaagaggttgtgatggccttgagatgcggagcacatgtcaatggcaatctctacactggaattaatacaaagcacatctttctgacgagcaagatggtcgaagagtacactggtttgcagatacagccacacaaggctcttgtgggagctaatgccttcgcccatgaaagtggcatacatcaggatggaatgctaaaacacaaaggtacatatgaaataatatcacccgaggacatcggacttgaaagaaccaatgaagcaggtattgtactggggaagcttagtggtcgccatgctttgagaaagcgacttgaagagcttggttatgaacttaatgacgaccaagttcagactttattttggtgttttaaagcagtggctgagcaaaaaaagagggttactgatgctgacctcagagcattggtatcagatgaagtttttcaagcagagcctgtctggaaacttggtgatttgcaggtgacttgtggaactcttggcctttctacagcaactgtcaaacttttgagtagtgatggtagcacacacgttgcctgttccattggtacaggaccagtggattcggcttacaaggctgttgatctgattgtgaaggagcaagtaacacttcttgagtactcgatgaatgcagtgacagaaggcattgatgcaattgccactacccgggttgtaattcgtggggagagtgaaacaagtactattactacccatgctttaacgggagaaactgttattcgaacatttagtgggactggagcgggaatggatgttgttgtttccagtgtcaaggcctatattgctgcactaaacaagatgtcgggtttcaaggaatcctctcaatctgctgaaaaaatttcaatttcttcattgaagatttgagaattgtgtggtgcttctttggtaacaattgtttgtgttaaaccacgaagaggaagacaatgttgcagcagcatccttgcctctcgcagttctccatattaagggttgtccctgtattttgaccggaatatatttgcaacctgtaatttattgattcacccaagtagcctttgcaaagaatgtaacttaagtccgttttaaatattcagactacagggattctttcccttttcattttcttgggtgccctttatttgaaattataaattataaatgtgcttcataattggagtgtccctgtccgttccagaataaagacatcttaaggtttccactttnngctannataaggtgcc

SEQ ID NO: 8381 - DNA, 1237 bp, Glycine max
tcagctacgtaggccccccccccatctggcagcagaagaacaagtagttgagaactaagaaggagaagcaaatggcttcctcaatgatctcttccccagctgttaccactgtcaaccgtgccggtgccggcatggttgctccattcactggcctcaagtccatggctggcttccccaccaggaagaccaacaatgacattacctccattgctagcaacggtggaagagtgcaatgcatgcaggtatgacaactccacacatataaatacacaagaggcaccaaaatgattataattcatgttacatatttaggcatgtacctaaatgttacttaaataaacatgttagtcataggttgcttaaattttagtcataggaaaatttgcacatgtgctagttaatctgttaacccctttactcaattttcatgcaaattaattactaggtgtggccaccagttggcaagaagaagtttgagactctttcctacctgccagaccttgatgatgcacaattggcaaaggaagtagaataccttcttaggaagggatggattccttgcttggaattcgagttggaggtcaatttcttgcaaacacttttggtttaatcatagattttcttattcttagtttgtttcaacttattttcaagaaataatggcttctcttgctagtgtgctaaaagtacttttggaaacaaaacaaaaaatggttgtgttccaaaatttaaatttatctaacagatttttctatctgagagttatcaatatgtatcaaatctgttcctatctctgaccaaattttattcttccaaaacaagcacttggttttgagttttgatggttgatctgcttgtttgcagcacggtttcgtgtaccgtgagcacaacaggtcaccaggatactacgatggacgctactggaccatgtggaagctgcctatgtttggttgcactgatgcttctcaggtgttgaaggagcttcaagaggctaagactgcataccccaacggcttcatccgtatcatcggattcgacaacgttcgccaagtgcagtgcatcagcttcatcgcctacaagcccccaggcttctaagtgtgaaaaatttgcaaagcatttgtagccgccaccccactttgtttgtttgtacttaaactacattcccatttgtttttgctttttgagatttcatcatcctgtatttttggtttctgttttcggacttcaatggaaatta

SEQ ID NO: 8382 - DNA, 1155 bp, Glycine max
cccgcaagcccaaacatcagtcatctccttcacaggaatcgtaaatcagaaattacctcgactctgccctgccacggctgagaaaatagcaacgctgaaacacgctcgtctccacgatcctgcgatccagcgcggcgtgtccagtgattccgctctacgacaagtctgcgcagggtgaagaatcgcgcgattcgtctgaaaatcgcgattcatgcacgattcatccccgatacagagattcaaccacagtccaggaacaaaagcgagacaacctccgattagtatcggtagcagctggaatcgtatccaatcgtgcgatacgtatcgtgactcttattattggttggcaatgcaagatccaaggaagaagaaaaacttaacccagaaggcatctttatttcagttgcaagcgaatggtgtcaaggaagatggacagacatctctgtctttaaaatcaagacagaagggttccaagagacacttgatgactgaagtctcaccaccttttcagaaacaagaaggttccaattcagattcgttgcctgactcctctgcagctggaaatgagtaccgtgcattgaggagaaagtatatgctgctggaggatgagagctttgcattagggaaagaggaaagagaggttgaagatgaggtaaaaacccttgaagatgaaaagtttgcactgttggatcagcttattgtaatggaaggccttgttgatccaacggagaagcactcttagtgtttgcaactatgttgacactctgtatgtcatttcatctcctgatttcatacctatatgtgtaatataatgcctaaaatagaagtgtcagtgttggctccttttgtctagctctagaaattggatgataaaaatcatttgtagagattttaagttgaaattccatcgttgtttaggtcgcaggctaaatactttaataattatgtctttaatcatagtaaactgttcatatttcttgttcactatgttatagttttctatgaattgtgatatgcattgtactgttttatacggcagcaagattctgtcgttggacaatgaacttttggttcaattatacatccaagtttactgccgaaggcttgttttcatttctgatatgtacagaattttactatttgagtattctgcag

SEQ ID NO: 8383 - DNA, 1845 bp, Glycine max
tcagctacgtaggcccccccccccgatcggtgaacccaacgccattgaactttgaatcattattcactcgtttcagtcaaacctttatctctctctttctttcttcaaattcaacttgcaattccaattcctggggagttggttccattttccgacgaaccatctcaaatccaccgccacataatgtaactgtatgcgaatgcgaatgtgaacgcggtttcgatttagatccagattcatggggatttgctttagcattgaagaccaaaaccacctttccatctccgattccaacgcgaagcctaaacctgcagtaggtcatgaatctggcgctccattggcttccatgaacatcaaagatctccgcgaaggtgctggatacagcaatgtggatatttttacctacgaggagcttaggctcgcgacgaagcactttcggcccgatttcatcttgggagaaggaggcttcggagttgtatataaaggcgtcatagaccatagcgtgaggtcgggttacaagtccactgaagtcgccattaaggaacttaatcgcgaaggatttcaaggcgatagggaatggctcgcggaagttaactatttaggtcaattcagtcacccaaatctggtgaagctcattggatattgctgtgaggacgaccaccggttattggtctatgaatacatggcaagtgggagcttggagaaacatctttttcgcagagtgggctcaacattgacttggtcaaaaagaatgaagattgctttacatgctgcaaggggactcgcttttcttcatggtgcagaaaggcctattatatatcgtgatttcaagacttcaaatatcttgctagatgcggatttcaacgcgaagctttcagactttggccttgcaaaggatggtccgatgggggaccaaacccatgtttcaacacgagtaatgggcacatatggatatgctgctcctgagtatgtcatgactgggcatttgacagctagaagtgatgtgtatggttttggggtggtgctgcttgaaatgcttattggtagaagagcattagacaagagcaggcccagccgagagcacaacttggttgagtgggcccgtccactactgaatcataacaaaaagcttttgaaaattctagacccaaaactagaggggcaatattcaagtaaaacggcattgaaggtggcccatttagcataccagtgtcttagccaaaacccgaaaggtagaccactaatgagccaggttgttgaaattctcgaaaactttcagtcaaagggggaaaatgaggaagatcaaatgcttcaaactggcgataccagtataaccctttatgaggttcctaagggcagcaatggcactccaacttagggctaaaaccaaactacaaatgacgacgaggtttacaggagcaaaggttggtgagaaaagaaaaaagctgaagccagccttcaaaagactctaatttatgtagttccttcacctatgtttgtgcccgagataagtcttcttccagaagttgaagtttcaccaatgtggatggcaattaaaatttgtacaaaatgttaacaggtggatccggtcggtgtttccagatgtgtgtttgctttgagcagaattggcgaaggcaattatgtggcttaagcattctctgttgttttttattccaattttgagttgctgtttattggagtattcaacagagttattgtaaaacattctttaaactactttctgcattcggtatgcattcaattaagcatcttgtgcgtctaatcaatagtgaggatgttaatagattacacgaattgttaacgaactcaaaaaaaaaaaaaaaa

SEQ ID NO: 8384 - DNA, 920 bp, Glycine max
gagatatcacaatcttattggaccaaatttctccacatgaattctcatctacattcttccaaagtgtagttaatagacgtgccaagttcctctgtgttctctttgcctcgacactctgcattcaagttccataatggcagcaaccatagcaacaacaatggctatgatcaactcaaagtgcatcaacacaacagggtcatcacacaagttgcacaaccccaagctcccaccctcaaaacccaccctctcccttttctcccttcagaacctcccaaagggcctaacctcccacgtctcaacttccacagcaggcactgccatcgcaggcgcaatattctcctcactcgcaaactgcgacgcagccttagctgcatcgcaaattgctgaattagccgaaggtgataaccgcgggctggcattgttgttgccgttgattccagccatagcgtgggtgctgttcaacattctgcagccagcactgaaccaactgaaccgcatgcgtaacagcaagggggtcatcgttgggctcgggctagggctctgtgcatcgggcatgatgtccggcccagaagcgtcggctagtgagattgctatgattgccgatgctgctgccagtgacaacaggggacagcttctgctgtttgtggttacaccagcgattgtttgggttctgtacaacattttgcaaccggcactcaaccagcttaacagaatgagatccgagtagagtgactttgctatgctaaggctaagggaatggaattttgcgcacccgattcgttccaatgcttttttccttgtaccacttcctgcttgtaacttgtatctattgctctctctctctctctctctctcaatataaaactgcttaaaactgcttcaagtttcattctcataaaaaaaaaaaataaaaaaactcg

SEQ ID NO: 8385 - DNA, 3341 bp, Glycine max
ccacgcgtccgtaattttccttaccaagatggggaaggatgttggttttcttctgagtctcagctagggattcaggaggaggacagagtccgtgtattgatcaacaaaatgatggtgaataattcagtcagtattgctggagaagggatagttggacgggcagcatttacaggaaactatcagtggattcttttgaacaatttcactagagatgcttatccaccagaggtatatcctgagttgcattaccaattttcagctggaatgcagacggtggcagttattcctgtgcttccccatggggttgttcaactaggttctttcccgccgataatggaagatataggatttgtgaatgatgtaaagaactttatcttgcaattgggatgtgtacctggtgcccttctatctgaagactattcagcaaaagtttctaatgaaaaattcgctggacctgtgaccgttgatccacctgtcattacttcaaactgcactccctcggtagctaatggttccaaccaacttactaattctcctcttgcttcaaggcctgttgctcagccacctcatcctctaaggggaggaataaataattaccagggttctttattgacacctcaagcctataacccgaaccaggtatttgatggcatttgccaaccaaaggctcattcaatgatcaaaacaaatgtctgtggccaaccaaagaagaccattgttgaggctgaagctaaggtgatacctacaaattttgattcatgtctgcaacaacattctgtttataatgctagatctgcattcaatgagttatctagtttcaatcaatcaaatctgagtgacggcagccttaaatatatggaacaacaaacatcaggtgttgggagacagagtcaagttattcctaacgtgaatccatcaagtgccttaaatatgcctcggctgaaaatcgatggaggtaaaattcttgaacagaatcagagttctagtggcagttcactactcggaggaatcccaatatgtagtgggagtaatcttttgaggacaaatatgattaactgctcactttcaaatcctcccaaagtatccactaacacttctgatttttctggaatgtacaaggttgggtttggactccaaagtaacaatacaacaactaatgctgtgctttgttctgtgcctaatttcactaatcaatcagttagcaatcacatgaatctagaaggctctggtcagaaaagtctttccattgatttaaagcaagtgtgggatgcctttgcgtcaactgatcaaaggatagatgatgatttgcttcaggccgcccttaagattccatctcttcatctggaggagcatgtgcctatgggtgatcacatctctggttttgttcaagattgcctcagtaaagatcttactagtcaacatatgatgaaaatgaatgttaagcatgcagaagccgatgctcaacttccatcaggtgatgacctcttcgatgttttgggcgtggatttgaaaaggagactactcaatggaaaccggaatgagttgcttgccactgattcagatgccatcacagaacatctagataaaaaggccacacacatgaatttgctacgtgggccccccccccccagttattcagttaatgaagctacctcagaaagtggcatcttctctggaacggacacagaccaccttttagatgctgtggttttaaaagctcaatctgctgcaaaacagaattctgatgaaatgtcatgcaggacaacattgacaaggattagtaccgcctcaattccttctcctgtctgcaagcaagttatgcctgatcatgttgccccgaggggattgtttgattttcctaagaccggagttaaaacagcttctgcagaaacaagttctcttaggtctgggtgtagcaaggatgatgctggaaactgctctcaaactacttccatatatgggtctaagcttagttcatgggttgagaatagtagtaattttaaacgtgaaagcagtgtttcaactggatactccaagcgaccagatgaagtttgcaaatcaaatcgtaaaagacttaaaccaggagagaaccctaggcctaggcctaaagatcgccaaatgattcaagatcgtgtgaaagagttgcgggaaattgtgccaaatggagcaaaatgtagcatagatgcacttctggaaaagaccatcaagcatatgcttttcctgcaaagtgtaacaaagcatgctgacaagctgaaacagacaggggagtctaagatagtcagtaaagaaggtggattgctattaaaagataactttgagggaggggctacatgggcatatgaggttggtgcacaatcaatggtttgtccaatcattgttgaagatctcaatcctcctcgtcagatgctagtagagatgctttgtgaggaacgcggtttctttctggaaatagctgacttaatcagaggattaggtttaaccatcttgaagggagtcatggaagctcgcaatgacaagatctgggcacgctttgctgttgaggcaaacagggatgtaaccaggatggaaatatttatgtcactggttcgtcttttggatcaaacgatgaagggtggtgcatcttcgtcgaatgcaattgataacaacatgatgctgtatcattctttcccacaagctacccagataccagcaactggcaggcctagtagtttgcaatgaactacctacttatagtttcttggtctggatgctcttgggagaaagaaatcctctcttaagatgaatttaactttgtctaactactgtttcatctcagtttggagggggatgagtttagttagtgaagaacttctcaagattaatatgcttttgtataatgtatatgcatgtttcttcctgttcctgccaaggtgacttatcctgtggttggcccatttggcagtgtctgctgatgctttaggcattctttagataacttgcatccattttttttttccctgagtaatgccattggtcaccaagttggataaggcttttgttgatgttgctgagtaatgccattggtgttcatggtgtgattcagatgtatagatattgtaggatttgctaaggggggaggtcatgtgtttgaccatcaagctttatgaccttttttctccacgtttcttggagtggtgatattggctgttataatataccaattttattaatgtaagctttgcgtggtttgtgttagtctatgctgaatgatgtactagattaatactaccttttagaataagtgtcacttcccagtgttgtataaggattaaggaaatcttaaaactgcaagagcgattggg

SEQ ID NO: 8386 - DNA, 3000 bp, Glycine max
ccacgcactctttttcggctgcgagaagacgacagaaggggatcatcatatcatgtcttatacaactgatgaagtgatcaacttgtaatgtaacacttttgagttgcattgttgcatcaccgcaagtccacaacatggctgccactgccgctgcaggcatagcttccttgttttcttcttctattaacagtgtcaaatgtcttcgttcctccaagaactgctccattatagacccccttataaccacagtgccctcaaaccgtggcatgtttgtgtcacacttggtggaacctttgtccattgggggtgccattaattcgcacaagttgtgggggcctagaatttctgctgctgttgcacaagaagaggctgttgttgtggctgatgatgaggtagatgatggtgctggtttagttgaagaagagaaagtggaggagaatgaaggagaagtagttgcagaacaagactctgattcctctgccaccaagctttattttgggaatttgccttatagtgttgatagtgccaaacttgcagggctaattcaggattttggtagcgcagaactaattgaggttctttacgacagggatactggaaaaagtagaggctttgcatttgttacaatgagttgtattgaagactgtaatgcagtaatagaaaatcttgatggaaaagagttcctgggcagaaccttgagggtgaacttctctagcaaaccaaaaccaaaagaacccttgtaccctgaaactgaacacaagctttttgttgggaacctgtcatggtcagtaactaatgagatattgacgcaagcctttcaagaatatggaacagtggttggagctagggtcttgtatgatggagaaactggaagatcacgtggctatggtttcgtttgctattcaacaaaagctgagatggaagctgcccttgcagcattgaatgatgtggaactagaaggacgggctatgcgtgtaagcttggctcaaggaaaacgtgcataaggttaataaaaatttgggaaggcttagatgttcaacaatggtgccatagaaatgagaagtggatgctagtatacctaccatgatgcagttgatgtactttgctgaggatttccttttcatttcttgtggtgtataaattatttattcccactttcaaaagatctgctgaccagaatgttgtattttgtgtttaacatttttgctgatactaacattggcctatctattgcttccttcttggctcaccgaatcatacattgaatcacatactctattctatgtaacatttgctatgaaatgatcagcactcgaaggtgtaaagtttgtaccaaaaaaaaaaaaaaaaaaagcactcgaatacaaacttcaaaatacattttctttttgctgcaattttataaatgggtaacttgaacatactgcagaatctataatgctagtatgctgaaataattgtttatttgattcaatatataccacattttaaacaaattagtgtactattgtgcatgcacagcttttaacatcatgtggttacatttaaatctccagctatggacaatgaaattgtgaattgtattgatgtggaatctgcaaaccaatgtatccaaactccatgtgattgccagcacaaatatatttttttgtttaaagtgattgctgttcttggcatgccaagaaccattgctgcatgtccttccccgttggtgcagccggatattatgagagtgaattatttcttgtcggaattcttatagaagcaaagctttgagtgaaaattgttgaacatcaatcagaccaccctccattagtcctgcaggtacaggtgatccctggaaacttgtcactgaactttttcctgatgacatgcccaaaaatatcatcttgacatttgatcaaacacataacctgcaaccaataaatgtcctaatgaacatgatcagaaaatgtgaattatcaatctgaatgattttaattaatcaaaaatgggaaaaaaaaagttatcctaaaatgctaattagaaacctgcaacctatgtatattgcctgtgatgagcttgccaattcgaaaatctgcgagcaatttccttggtttgtcaaaatctaggatccctttcgagtgatgttccagaatacctttagccagattgataccatacctgcagcccttaacatgcctttagtattgactagttttttttccctccaccctatggtataaaaataatcaggtaaacataagctcatcaaacacgcgattctaaccaaaaactttgcccaaatccacacacttaatccaatttccatagaacattgcatcataaatagtgcatgcacgacaatcatatagagtatgcaaacctaggctttttggtccctcaatccctaacaacagaaattaacttaaaatcacaatgaattaagaaaagacttaaccaacatcgagaagctcattaaccgttcgtagaatcagttgtgtcctaaatccaagtggacgcattgcgtccagggcagcatccatgcgcctgataccctgcatcttgttctgcagacaaaataaaacaccattaaggaagggaaaaatgttagaaaactcacaaacacgttaaaacaaaacaaaaacaaaaacttggcaaacataatacgataaaaatgcaaaaatattcataaaaagttcagtgaatgaggaagaaactcaagagggtaacaaaataggggggagaaagtgcacgaaagtgtgaaatgaaggaattaaaagctgttttagtgctttaagaaagagaagacgtgttgttgttttggaaaaaaagcaaaacacgtgttgctgttgaaaaaaaaaaagcaaaacaggtatccaaaacaggtgagcaagtggagtctggaaaatcagacacatgtaaaaagcaaagcaggagactgggaaatgaaagggttaaaagaccaaaaaattaaggaaatgaacagctatcacaatcttagacagagatattttagaa

SEQ ID NO: 8387 - DNA, 919 bp, Glycine max
ttttttatgcccaaaaagacatcagaacatcaattatttacttatatgaaccaataagcaatttactaaatagttttactgcagaggaacttaacctcaacttccatcacaacaatgacaaaaaagaaaaaaaaacaagtgaaaaagtgataaaacaaaggttattttatcacaaaatattgcagatctgataaaagtgcacatcccttttatatatcagaaggaggaggaaagatgcgtgacacaggagatattacatattgttggatataattcttagaattgtttgggtcaggaatccaatgaatctcactcatgtttggtgtctcaacaaaggccatagtgaaccctcctaccttcactagtttccctctcttccctgccctcagtataaggttcccatgctggtacgaaaatatgccattggtaagacaaattatgtcacctgaatcaaaagcatcgcactcgtcgccccagaactggaaatgaatagctgcagtcgcatctgccacaagagccaggcatatcttgttttgcccttctactgtggtcttgcctttgtccaaaatgataaatttggtgtctatattgttctgagctgcaggcacaatgtctttgagaagaatcatgttttcacttgttgtttccttcaacaacctaaatcgcatccagaaagagcattcaggtgaaactcgatttgatctaccgttgcggcgacagattcaaagtggctcaatatagagacaaagcgatttcgcttccgcttccgcttcgttccttcctccttcctatcaatggaaatggaaattggagtttaaattcgcagatagagagagagagagggcacagagaaaggactgcgtttttgtttttgttgcccccttctgtcgtcctctcgcagccgtacggacgcgtggga

SEQ ID NO: 8388 - DNA, 1393 bp, Glycine max
ttttttttttttttttttcgctaaaacaaattaccaatatatattaaggtgaagaggaaacaagctttcttagtctgtgtgtaactgcttccattaacatacatggttgacaaccgaaaacataatataaaattaccataaaaaatataattacttccattaacaaattcatgcatggttcacaaccgaaaacataatacaaagttatcacacaaaagcaactttttatgtacaaaattccaatgccaattgccaccaaggttgtcaatgaccagtgctaaccaatgtcacagacatgtttcagctttctaacgtctcatagttcccttttgcttggttgaagactgtgaccatgatgatggctttaccctaccagctagaaggttggatgctgaagtggcacaaatttttcttcgttttgactctagctcttgttttctcttgtcagatatcgaatagctagagactccagagaaaatagattcagaattgatcaatgccctcttgtccttcctatttctctcaaacttagctggaaatttcactgattttgccgtggcagaatcttgttcagtagctggaagaagtcttatgccaaggcctcttttcttggaagcattttcttcttgagcaactcttttcttttgacctctaagttgggcacggagagtcttattaagagaatagtcatctgaatgccttgcatcagactgcctctggagacgtacgatcactggttcagcttccttctttttcttcaagtcttcttcctggtgttcaaggcggtaaaatggatctgcaagcttacccttctcttcatcagcaggcaattcaaaagtttcggcatcctcaatatcaaaatcttctgtttttttctgggcaccactaataatgacatactcgcaattcttaggatcagtctgaatgacaatctcttgtttacagcaggcagatttcatagtgaagctccatatctttgttgagtaataattcccgacttgttttttctctgcattgaaccggacaccctttgcaatcattgaattgcatcctccacaccatatattaaaaggcatctcaaaccttataatcaggataccctgatctaattttctcgccctctctcgcaaggcatgttgaccatgaaacttgttcagcgaaccctgattcggttcccattctgggggatagtaaaagttgtctgctctagcagccgcaagtgaagacattgttgtttatcttcgtcaaagattgagaagcttttcccacagaatctaagattcttcactgattcagaaattttggatctaaatgaaatttgaagcgaaaagatactattgtttagaaagagggtttcgcgcaatcttcggggggggggcctacgtagctgaga

SEQ ID NO: 8389 - DNA, 600 bp, Glycine max
tttattaaaaaagaaaacacattttccatatttaaaaaggggaaaaatgtcactcaaatattcattaattaccgtgtataaccacggtgaaagctaaaatctcttggccaaaataataatccaaactacatttggtgacacaactgatctgtactcttttagacgaaaaagttcagtcagatgaggtgccataaaatgagtcaaattgaacttattcatcaggaaaacaaaccaaaaagttacttttcatagtaagtacattgaatcaatttttccccacaatggatgcttcggtctgaactcttattcagttgcttcaacctgttcagacgtttccgtttgtttcattttttccaaggaagaaattcgaccttccagcgatttgtggaggtcattcatctgttgagtaaaggattggtgcgcgaccttgtaatccttgtggagggtgtagagccccagaaacgacgccactgcagccccggtgaagaacgacgccaatctcactctcatcacataccccatttcccccctttctctctcagtctctattacacttcacaaatactactcctttcttcaacgatgctgctgtgccgaatt

SEQ ID NO: 8390 - DNA, 887 bp, Glycine max
tcatctctttatgaaacttgaaaactagtgaaacggagaggtgaaggggaaaaaaaaaagagtagagtggataatggcttcgttatcgctttgcatagccatgagagcacccactccctcagcttctctcattctcactaccccaaaaccatcttcactctctttgaaccttacccgcacttgctccagcgctcgctctccgctcctccattgctccttcctctcttctccttcccatctctcttccccttcctccgtttcaggcttgtcacttggattggatttgacatctaatgttgggaccagaagaggaaaaggttctggcctagttgtgagggcaggcaaggctgctctttgtctgactaagagaagcagatcaagaaaatcattggcacgcactcatggtttccgcaaaagaatgagcacaccaggtggaagagctgttttaaggcgacgacgtgccaaaggacggagagtcctatgcaccaagacccacccaaatagtgggaaatagtggtgaaaagggcttacatctgttctatttcagtggttaaatttaatgtattgattcatccaaacttgtctgcatttcaagattttcattttccccctaaaagtggtttttcacttttttgtaccctgtatttgtaaaatgtttactattttgtagccttacttttcgtctctgtcatctataattcttgccaagttgcatctacatttgcttcaaagatgtttactacaaaacgaatcacaaatcagacttgatggaatgtcaaacaagataattgattttgcatgtaaattacttgtgctatgttaacaactggtatttttttctttgtattttgttttcaataaaattattgagggtgcattatgtaaaa

SEQ ID NO: 8391 - DNA, 1622 bp, Glycine max
  misc_feature (1505)..(1506): n is a, c, g, or t
  misc_feature (1520)..(1521): n is a, c, g, or t
  misc_feature (1541)..(1541): n is a, c, g, or t
  misc_feature (1544)..(1545): n is a, c, g, or t
  misc_feature (1556)..(1557): n is a, c, g, or t
  misc_feature (1573)..(1574): n is a, c, g, or t
  misc_feature (1593)..(1594): n is a, c, g, or t
  misc_feature (1609)..(1610): n is a, c, g, or t
ggctcgagccagtctgggttggtgggcgttgttggttcagtgttgtggtgtttgtttccctcccaagaatataacccccctctccactcccacccgcggctcgcgcggctcgcgctcgctctctctcaactcccaattactttgttgcatttcacacaccaacttcccatagaagagagaagagagaagagactcttccttccatcctgcaactcaaatcatcatgcaagactccagctcaatgaagatctcccctctggatctcatgtccgccatcttcaagggcaagctcgacccctccaacgtctcctcctccaccaacgccgccgccgccgccttcctcctcgagaaccgcgacttcctcatgctcctcaccacctccgtcgccgtcctcatcggctgcgtcgtcgtcttcatctggcgcagatcatcctcccccaaggccaagcctctcgagcctcctaaacgcgtcgtcgagaagcttcccgaaatcgaagtcgacgacggcaccaagaaggtcaccatcctcttcggcactcaaaccggcaccgccgaaggcttcgccaaggccacagctgaagaggccaaagcgcgatacgagaaggccacgttcagagtcgtcgatatggatgattatgccgccgatgacgatgaatacgaggaaaggttcaaaaaagagactcacgttcttttctttttagctacatatggtgatggtgagccaactgataatgccgcgagattttataaatggtttacagaggggggtgagaaaggagaagggtggcttcagaatcttcactatggtgtgtttggccttggaaacaggcagtatgagcattttaacaaggtggcgaaggtagtggatgacatgctcgttgagcaaggggggaagcgccttgtgccagtgggtctaggtgatgatgatcaatgcattgaggatgactttactgcatggaaagaagaactgtggccagcattggatgaattgcttagagatgaggacgatgcaactgtgtctacaccttatactgctgcagttttggagtaccgggttgttattcatgatccattggaagcatctgtcgacgaaaagaagtggcataatgtaaatggtcacgccattgtggatgctcaacatccagtcagggcaaatgtggctgtgaagaaaggagcttcatacttctgcatctggatcgatcttgcactcatttgggaatttgacatttcaggcactggagttacatatgaaactggggaccatgttggtgtttactgtgagaatttgtctgaaactgtggaagaggcaataaggttaataggtttgtcaccagatacctatttctcaatccatactgatgatgaagtcggcaccccacgtagcggaagctccttgccacctacattcccaccctgtactctaagaacagcacttacacgatatgcagatgttttgagttcacccaaaaagtcgtgccttgcttggccttagctgctcatgcatnnctgatccatctgannagctgatcgactaagacatnctnntgcctcacctnngctggaaaggatgaanntattcagaggtgggtgatnntgcctctcagaagannagtctccttgag

SEQ ID NO: 8392 - DNA, 2144 bp, Glycine max
ggctcgaggtgatggtgagccaactgataatgccgcgagattttataaatggtttacagaggtgagtttgagactgttccggtggcattaaggttgagagcttatgtgttgactttgtgtgcttttgtggaggatttaggggggtgagaaaggagaagggtggcttcagaatcttcactatggtgtgtttggccttggaaacaggcagtatgagcattttaacaaggtggcgaaggtagtggatgacatgctcgttgagcaaggggggaagcgccttgtgccagtgggtctaggtgatgatgatcaatgcattgaggatgactttactgcatggaaagaagaactgtggccagcattggatgaattgcttagagatgaggacgatgcaactgtgtctacaccttatactgctgcagttttggagtaccgggttgttattcatgatccattggaagcttctgtcgacgaaaagaagtggcataatgtaaatggtcacgccattgtggatgctcaacatccagtcagggcaaatgtggctgtgagaaaggagcttcatactcctgcatctgatcgatcttgcactcatttggaatttgacatttcaggcacgggagttacatatgaaaccggggaccatgttggtgtttactgtgagaatttgtctgaaactgtggaagaggcgataaggttaataggtttgtcaccagatacctatttctcaatccatactgatgatgaggatggaaaaccacttggtggaagctccttgccacctacattcccaccctgtactctaagaaaagcacttgcacaatatgcggatgttttgagttcacccaaaaagtctgccttgcttgccttagctgctcatgcatctgatccatctgaagctgatcgactaagacatcttgcctcacctgctggaaaggatgaatattcagaatgggtgattacctctcagagaagtctccttgaggtcatggctgaatttccatcagccaaacctccaattggtgtcttttttgcagcagttgctcctcgcctgcagcctagattttattcaatctcctcatctccaagaatggtgccaaacagaattcatgttacctgtgcattagtacatgataaaatgcccactggaaggattcacaagggagtgtgttcaacatggatgaagaattctgtgccattggagaaaagccaggactgcagttgggctcctatttttgttaggacgtccaactttagactccctgctgataataaagtgcctataatcatgattggtccaggcactggattagctcctttcaggggtttcttgcaggaaagattagctctgaaaggagggggagctgaacttggcccttcagttttattctttggatgcaggaaccgtcaaatggactacatctatgaagacgagttgaatcacttcgttaatactggtgcactttctgagctcattcttgccttctctcgagagggacccaccaaggagtatgtacaacataaaatgatggagaaggcttcagaaatttggagcatgatatctcaaggagcttacatttatgtgtgtggtgatgccaagggcatggccagggatgtacaccgtgccctgcacacaattttgcaagagcagggttctctcgatagttccaaggctgagagcatggtaaagaatctacaaactactggcagatatttgcgcgatgtatggtgatgatatctgaatgcaagcctcggggtgacgaagatattaataaaacctagagttatggctataagatattgaaagggccttatttgcgccacctttcatagtgccctcaaaattgatgggggttcttgttgccatcccgacaacatttcctaccattctttttcactatattttctaaagaattctttttggttcgtgtaatttatatactgtttatacctagactatgaacgatttactttagctttcatgtaatgtatgatgaacctcaaagaaaggttcagagacgcagacaattccttgtactgtatgaactataaaagaatgtttggaggtaaagaaactattttgtgcaagtgttattactagatttaaatttaatatcccaaaaaatgcaataatcccatgcaaattactatta

SEQ ID NO: 8393 - DNA, 1545 bp, Glycine max
ctcgagccgaatcggctcgagatttcaggcactggagttacatatgaaactggggaccatgttgctgcttcctgggcccccccccctgaaactgtggaagaggcaataaggttaataggtttgtcaccagatacctatttctcaatccatactgatgatgaagatggcaaaccacgtagcggaagctccttgccacctacattcccaccctgtactctaagaacagcacttacacgatatgcagatgttttgagttcacccaaaaagtctgccttgcttgccttagctgctcatgcatctgatccatctgaagctgatcgactaagacatcttgcctcacctgctggaaaggatgaatattcagagtgggtgattgcctctcagagaagtctccttgaggtcatggctgaatttccatcagccaaacctccaattggtgtcttttttgcagcagttgctcctcgcctgcagcctagattttattcgatctcctcatctccaagaatggtgccaaacagaattcatgttacctgtgcattagtacatgagaaaatgcccaccggaaggattcacaaaggagtgtgttcaacatggatgaagaattctgtaccattggagaaaagccaggactgcagttgggctcctatttttgttaggacctccaactttagactcccttctgataataaagtgcctataatcatgattggtcctggcactggattggctcctttcagaggtttcttgcaggaaagattagctctgaaagaaggaggagctgaactcggcccctcagttttattctttggatgcaggaaccgtcaaatggactacatctatgaagacgagttgagtcacttcgttaatactggcgcacttgatgagctcattcttgccttctctcgagagggacccaccaaggagtatgtacaacataaaatgatggagaaggcttcagaaatttggagcatgatatcacaaggagcttacatttatgtgtgtggtgatgccaagggcatggccagggatgtacaccgcgccctgcacacaattttgcaagagcagggttctctcgatagttccaaggctgagagcatggtaaagaatctacaaactactggcagatatttgcgcgatgtatggtgatgatatctgaatgcaagccgtgggggtgacgaagatattaataaaacatagagttgtggctagaggattttgaaagggccttatttgtgccacctttcattagtgccctcaaaattgagggggggcgcttgttgccatcacgacgacatttcctacgattctttttcactatattttctaaaggattctttttggttcgtgtaatttattatatactgtttatacctagactatgaactattttacttcagttttctttttgtaatgtatgatgaacctcaaagaaaggttcagagacgcagacaattccttgtactgtatgaactataaaaaaatgtttggaggtaaagaaattattttgtgcaagtgttattattagagactcaaaaaaaaaaaaaa

SEQ ID NO: 8394 - DNA, 1048 bp, Glycine max
  misc_feature (978)..(978): n is a, c, g, or t
gaattcattcactttttatttctcttccacacacatatcttgaaaataatcttcttcagtctaaagcaaaaacaacaactcttcatgtctccggcccgaggatttgggaagccattattcgcgaccttttaccactgggtttgggaaaggcacggaaggctttgctttcaggttgctcagcaggaggtttagcgacctttcaccattgtgacaacttcgccaagtatttgccaacgaatgctagtgttaaatgcttgagtgatgccggtttttttcttgacgaaagagatatcagtttgaatcatactatgaggtataatttcaaaagtctagttcaattgcaggggatagagaagaacctgaacagaaattgtaccagagcactgtactttccagacttgtgcttctttccacaatatgcgttgagatacatatcaacaccatattttatcttgaactctgcctatgatgtattccagcagttcactcatatattggtgccaccctctgctgatatgcgcggacactggaaacactgcaaggcaaacctggcagagtgtacaacagaacaaattgatacattgcaaggttttaggctagacatgcttggagctttgagaccgttctatatgaattcaagaagaggggggatgttcataaattcatgttttgctcattgccaaagtgaactacaagaaacatggtttggggatgattctccaagaataaacaataagactattgccgaagctgttggtgattggtattttagtagaaacttaagcaaggaaatagactgtgcatatccttgtgatgcaacttgtcataatcttataccgtaacctcaggttaattggaagattaaactgaattttcctcaagcttctctatttctcacagagaagctatgatagttctctaaaaaagaattcagaggcattttttcgtagaaagccattacagtacagtgaatgctangcagatagaaaattctttgataggaacaagaaagggataaagaaaccaaaagaaaaatgtggcttgaatg

SEQ ID NO: 8395 - DNA, 909 bp, Glycine max
ctcctggggcattttccccatttatggatgaaatcaagaagcgtgcaaatcagaggaagcaacttgctaaaaaggaaaagaaggaaaaaataatggctgaagctactgctgcttattctcttcccatatcattaagtcatcagtttacttctcgcaatgatcctccgacattcttcatggatgactttgaagctcttggaaattcaaccatatcatcaagtcctcccttagctggggagagaaaatcgttctcaaatgttactaggcttgggtttgctgctgctcatgattctccatccttacaaattcaagaaactagtggtctgcataataacaacacaactgctgattcttctgtcacaacaggtttgagaaatggggagacacaatcatactccaatgctacatcaagaacagaatctaatataagctcgaatgcaccaaagacaaatgagttggggaagaagggaaagaaaccaaatcgagttcttctgtcaacagctggtggtaggcgctattgattttggttgccgacccttaccctagattatgcgagtgtcaatgattctcagcctcctccctgctatagtcccaagccaaactctctggcagatgatttcagtgtagagttagtaacgttctacggatcatatttatgcacctcttaactacttgtaggtaggtaggcatgtgtggagagaataaatgtttttagcaataaacaagccacaactgttagaaggtcagtatattgtttctgtggatctgtagaactgtgctggcgttgggtatgttaattaaatccagactatgagcattgactatacacaagacatttaaatttggaagcgggttttgttaactacagattgattttttaaacacaaaaagtgtgtactaatccttagt

SEQ ID NO: 8396 - DNA, 2790 bp, Glycine max
ccacgcgtccgacgcgaagccgcgaaagacacaacccaacacaagacaataaaagctgcttcgcaggccccccgcctcgaaaagtagcatagaggaagccgaaccaacgaaccaaccccaaacccctctttttccagaactttcatgtccatcttgccctcacaaacccaagccgcatcttcgtcttcttcctctgcgccatctcctaaccctaattcccaacatggaatcggaatccctattcctcaacccttcccttctctttccccctcaccaatcaacctcactttcggatctctccagatctccgataccccaggttcatcggcttcagctgctcaagattctggtggatcttccgaaaaggtgacagaagtagggtctccaagtggagtaatggtttcacctcagcaaaactctagaacaggttctaggagtcatgggggaagacggactggaatgggaacaggaacagcttcttatcatagaaatcaacaaactcctgggtccgtccattctcacggaagtgccccttcggcggggagaaaagctcagacggtgaacgggaattacttgctgaattttcaatatgacccgatatcccgttctcaaccacggggtcctcctcctccccctaccactacaagaaggcatcggaagaggaagccgtacaacaaagatttgtttctgcaggcaaattacaagttcatggtgctaggtttgggaaattattcacctgagtcgatggatccagataaaatgttgcagtgggaagatattatatgtgtgacatatttgacccccttttcagttcagtgtccaatttgtttggagtatcccatgtgtccgcagataaccacatgtggacatattttctgtttcccatgtattctacagtacttattgatgggtgaagaggatcacaaaggtgatagctggaaaaggtgtcctttgtgctttgtgatgatatctgccaaggatttatataccttgcacatcacaaatgtaaaacagtatcaagtaggagataatgttgagttcacctttttaacacggaaaaaggattcctttactctgtcacttaaaaataaacgagagacaaataccacatcaggtgtcgatggagatatctgtgatcccttttctaagttcactctcagctccgaggccccccccccagtgaagcatgcaatatccgatctagatggttggctagccagagctgattcaggtcttgttgatgacctggagaagcttccttatgtttgtgctgcaatgcaacaattagaacagaggaagaggtattggagtgagcacaggtctcatgacagtgaaaaatcttctatgattattgattgtggacaccagataccatcaacagttgcaaattctatggatactgatgatgaaaactgttctaatggatcaataacttcttcttctgatttccttgatcaaaataaggttatgatgttggataagtcaactgctggagcctgttcggatcaaaacttggatgtggagaaagaattaatagagcaggaaatgaatttatcttcttcatatgaggagaaaaatgataatcaaaggcattcagaaggtgttattggagatgtgaaggaaaatagttcatacagtttctaccaggctgctgatggtcagcatctaattcttcatcctctgaacatgaagtgtttgcttcaccattatgggagctatgatatgcttcctcacagaataagtggaaggattctacagttggaaacagttactcagactgaagccatcaggaggcggtatcgatttcttagtcattttccattaaccacaacctttcagctttgtgaagttgatttgagtgagatgttgcctcctgaagcattggccccatttatagatgaaatcaagaagcgtgcaaatcagaggaagcaacttgcaaaaaaggaaaagaaggaaaaaataaaggctgaagctactgctgcttattctcttcccatatcattaagtcatcagtttacttctcgcgatgatcctccaacattctccatggatgactttgaagctctaggaaattcaactatatcatcaagtcctcccctagctggggagagaaaatcattctcaaatgttactaggcttgggtttgctgctgctcatgattctccatccttacaaattcaagaaactagtggtctacataataacaacaggacctctgattcttctgtctcaacaggcttgagaaatggggagacacaatcatactccaatgttatatcaagagcagaatctaatataagctcgaatgcaccaaagacaaatgagttggggaagaagggaaagaaaccaaatcgagttcttctgtcgacagccggtggtaggcgttattgattacttggttgccgacccttacccttaccctagattatgtgggtgtcaaatgatacccaaccttctcccggctagtcccaagccaaactcttttggcagattatttcagtgtagagttattaacgttctatggattatatgtactttatgcgctcttaagtacttatagataagtagatatgtgtggagtgaataaatgtttttagcaataaacaagccaaaacagttggaagtttagtttattctttctgtggatctgtagaactgtgctaatttaatccagactatgagcattgttgcacactaggataggcattaaaattggatgaatatataatttttaaagaaagtgttctaataaaagagtaaggggtatttttaccaaaaaaaaaaaaaaaa

SEQ ID NO: 8397 - DNA, 1147 bp, Glycine max
tcagctacgtaggccccccccccaatatgtgcctaatggaagcgtctccagtcacttgtatggcgctggtcaacaaccgcgagagaagctagaattcaagcatagacttccaatagctcaaggtgcagctaaaggtgatcctttgcaaaatcagtgagcatttgtggctttcctggtttggctcatcttcactctttgagtccccgtttggtgcataagaatttcaaaacagctaatgttcttgtggatgaaaacttcattgctaaggtggcagatgctggacttcgcaattttttggggagagttgacattgcaggctcctcttctcaagtggcaacagatgaaatattccttgcatcagaggtgagagagttcagacgattttctgaaaagagcgatgtatacagctttggggtgtttttgctggagttgttaagtgggaaacaagcaacagaatcaccatttccggactctaatcaaaatctggttgaatgggtgctaagtaatcaagaccgtggcatgatgtcttacatcattgatagaagattggagagtagttttacagctgagggaatggaagagtacatcatgctcataattagatgcttagatccttcaagtgagaggcgacctgccatgagctatgtggaaatggaacttgttcggatcctagacaaggaaatgaacttgacaacaatcatgggagaaggaacccctactgtgactcttggaagtcaattattcaaatcaacaaaataaaaataaaaagagggtattgttgtcttaaattgttacgtattatatattatatactatatttgtgcattatatctttgctttattatttttccccctcggtgcataccagagaatagggccagctgcttcctaagtgtataaagagcagttgtatcccctctattcatcctccccctctatttttcttctctttttttatcaatgggccagtgaaaagctgtattcttttctttcttttccttcataaatgtatcagatctcttgtaaaccattatttgttgttaatatgacagtgaagattgggttggtgtggttgactgtatcaaaaaaaaaaaaaaaaaaaagaaaaaaaaaaaaaaaaaaaaaaaaaaaaaaaaaaaaaaaaaaa

SEQ ID NO: 8398 - DNA, 1141 bp, Glycine max
  misc_feature (1121)..(1121): n is a, c, g, or t
cccacgcgtccgtacggctgcgagaagacgacagaaggggatataacaatcattctttctcaaaacacttgctccattattattttctcattcattcgttcatcatggttcggttcagcaacaacgtgatcggactcctgaacttcctgaccttcctcctctccatcccgatcctggtggccggagtgtggctgagcaagcagggcgccaccgagtgcgagcggtggctggagaagccggtgatcgcactcggcgtcttcctcatgctcgtctcactcgccggcctcgtcggcgcgtgctgtcgcgtgtcgtggctcctctggctctacctcctcgtcatgttcgtcctcatcgttcttctcttcgccttcaccatcttcgccttcgttgtcaccaacaagggcgctggcgaagttgtgtctaatagagggtataaggagtataggcttggggattactcgaactggttgcagaagagggttaacaacactaagacgtggaacaggatcaggagttgcttgcaatctgggaaagtctgcactgagtttcaatccaagtttctaaacgacaccgttactgagttttactccgaaaacctgtccgcgcttcagtctggatgctgtaaacctgcagaagaatgccagtttagctatgtgaatccaacgacatggacgaagcccacaaatgtgactaatcagagcaacccagattgtgatgcttggaataacgatccaacagttctgtgcttcaattgccaatcatgcaaggctggcttactgcaaaacctcaagactgattggaagagggtggctgttgttaacatcgtattccttgtcttcctcattattgtctactccatagggtgctgtgcattcaggaacaataggagggaaaattggaagggttattctcgttagctaagattactcagtattattactagtgtgtagatgagtttgctagacaatctggtttatatggtggatttttattttttatttttttatgggctttatgtgtatgagctgttttcagtagacagtctgttatctaaattgctcaattttatatagcagtttcctagtatcatctatacgtaaatattacttctggaaaacaanccagactagttctctctctc

SEQ ID NO: 8399 - DNA, 2356 bp, Glycine max
gtttcgaacaatgggtttaccggtcaggtgccgagctctattggaaatcttcagttgctgaagatgttaaatttttctggaaatggtctcactggtagtctgccggagtctattgtgaattgcacaaaactttcggtgttggatgtcagccggaattcgatgtccgggtggcttccgttgtgggttttcaagtcagatttggacaagggtttgatgtcagaaaatgttcagcgtcggagcccccccccccctttgtttgccttggctgaagtcgcgtttcaaagtcttcaggttttggatttgtctcacaatgcgttttctggcgaaatcacatctgcagttggaggtttaagcagcttgcaggttttgaatttagcaaacaactctctcggaggtcctattccagctgccattggtgaattgaaaacatgttcaagtcttgatttgagctataataagctgaatggaagcataccttgggaaataggaagagctgtgtccttgaaagaactggtattggaaaagaacttcctaaatgggaaaattccatcgtcaattgagaactgctctttgctaacaactttgattctgtcccagaacaagctgagtggtccaatacctgcagcagttgcaaaacttactaacctgcgaactgtggatgtatcgtttaacagtctcactggaaaccttcctaagcaattggccaaccttgccaatcttcttaccttcaatttatctcacaacaaccttcagggtgagctgccggctggtggttttttcaacaccatttcgccttcctctgtttctggcaatccatctctttgtggcgctgcagtaaacaaatcatgccctgctgtcctcccaaagcctattgttctaaatcccaacacctctactgacactggtccgggttcattgcctccaaatttgggtcataaaagaatcattctcagcatttctgcactcattgccattggtgcagctgctgtcattgtaattggtgttattagcatcactgttctcaatctccgtgttcgctcctctacacctcgtgatgcagctgccctcacattttctgcaggggacgaattcagccgttccccgactacagatgctaactctggcaagcttgtcatgttttcgggtgagcctgatttcagttctggtgcgcatgctttgcttaataaggattgtgagcttgggcgtggaggatttggagcagtgtaccaaactgttcttagagatggacattcagttgctataaagaagctcactgtgtcaagccttgtcaagtctcaagaagattttgaaagagaagtgaagaaattaggaaaaatcagacaccaaaacctcgtggaactcgagggttattattggactacatcgctgcagctgctcatatacgagtatgtctccggtggtagtctgtataagcatctccatgaaggatctggtgggaacttcctctcatggaatgagaggtttaatgtgattctcggaacagcgaaggccttggcacacttgcaccattccaacattattcactataacattaagtcaaccaatgtccttcttgatagttacggtgaaccaaaagtaggggactttggcctagcaagactgttgccaatgcttgatcgatacgttttgagcagcaaaattcagagcgcactcggctacatggcgccagagtttgcctgcaagacggtgaaaatcaccgagaaatgcgatgtatatgggtttggtgtcttggtcttggagatcgtcacagggaagaggccagtcgaatacatggaggatgatgtggtggtactatgcgacatggtgagaggggctttggaagaaggcagggtggaggagtgcattgatgagaggctccaagggaagttcccagcagaagaagctattcctgtcatgaaactaggcttaatatgtacttctcaagtgccatctaacaggcctgacatgggagaggtagttaacatattggagctgataagatgtccctcggaaggacaagaagaattggcatgaattaacttgcgattttcttaattaggaggatagacaatgggatgtccggggaagaagaatccggctttatttattagaaaagcgaggaattattttgttgcaaaatgtttactttttcattgtaattttcttccttgttagttagtctctagttgttgtttgtttttaagatttctcttatgttatgctactacacctaggatgccggattccttttcaccgggtttcgttttggaccccccttgaaaattgttgctcaaatactgatctttcatgttctagtttgtttgttttggtgtcacaaaaaaaaaaaaaaaaaaaa

SEQ ID NO: 8400 - DNA, 1981 bp, Glycine max
  misc_feature (4)..(6): n is a, c, g, or t
  misc_feature (15)..(15): n is a, c, g, or t
  misc_feature (18)..(22): n is a, c, g, or t
  misc_feature (32)..(33): n is a, c, g, or t
  misc_feature (36)..(38): n is a, c, g, or t
  misc_feature (64)..(66): n is a, c, g, or t
  misc_feature (87)..(87): n is a, c, g, or t
  misc_feature (90)..(90): n is a, c, g, or t
ctannnagagatatncannnnncaaataatanngtnnnttgatgatactaatgtgtatcgtgtnnnaattcacaagacttttgaagnaantcttacaactaagcccatcaatggtgctccacgcgtccgcggtcccggggctgggcagttgtttctcaaggttattcataccagtgtgtgggctggtcagaagcgtcttgggcagttggcgaagtggaaaacagcagaagaagttgctgctcttgtaaggtctttgcctgttgaagaacagccaaagcaaattatcgtcactcgtaaaggaatgttggatccattggaggttcacctgctggatttccccaacattgttattaaaggaagtgaactgcaacttcctttccaggcatgtttgaaaattgagaaatttggggatcttatattgaaggccacagaaccccaaatggttttgttcaatatctatgatgactggctgaagagtatttcttcatacactgcattctccaggctgattctgattctgcgtgcactccatgtgaataatgaaaaggcaaaaatgttgctgaagcccgataaaactatcatcactgaacctcatcacatctggccttctctaagtgatgatcaatggatgaaggtggaggttgcattaagagatcttatactatcagattatgcaaagaaaaacaatgtgaatacttcagctttgactcagtctgagattcgtgatattatacttggagctgagattactccaccttctcaacagcggcaacagattgcagagattgagaaacaggcccatgaagcaaatcaggtgacagctgtgacaacaaagactacaaatgttcatggtgaagaacttatagtaaccaccactagtccttatgagcaagctgcttttggttccaagactgattggcgtgtccgagcaatatcagccacaaatttataccttcgtgtgaaccatatatatgtgaactctgaggatataaaggaaactggatacacctatattatgccaaagaacattttgaaaaagtttatatgcatagcagatcttcgaacacaaatttctgggtacatgtatggcgtaagtcctccagataatcctcaggttaaagaaattcgctgcattgtgatgccaccacaatgggggacacatcaacaagttcatctgccatcagctcttccagagcatgatttcttgaatgatttggagcctttaggatggatgcatactcaaccaaatgaacttcctcagttgtcgcctcaggatctcacttcacatgccaagatcctagagaacaataagcaatgggatggggagaagtgtattatcttgacttgcagctttactcctggttcttgttctttaactgcatataagctcactccatctggttatgaatgggggcgtgttaataaggatacgggaagcaatccacatggttaccttcccacccattatgagaaggttcagatgctccttagtgatcgcttccttggtttctacatggttcctgataatggtccatggaattacaacttcatgggggtgagacacgcatcagggatgaaatatggagtgaagcttgggactcctagggaatattaccacgaggaccatagaccaacccatttcttagagttcagcaatatggaggaagtggagataactgctgagggagatcgagaggatacattctcttgagataaaaatatttttgtttgagatatataagtggcaggtcttttaattttttaaacttgtcagagtatgttgtattatctactgttttttcatcctagggattttgcaacaacggtatcatagctttgtatataattacgaatcaacaattctacttctacaaatatctgcttctgcatttactatatatccaattttagcaaattatgaaaagacgtaactgaataactgtacgtggtcttttggtaaaatattctaattcattgaatt

SEQ ID NO: 8401 - DNA, 2167 bp, Glycine max
  misc_feature (2055)..(2056): n is a, c, g, or t
  misc_feature (2061)..(2061): n is a, c, g, or t
  misc_feature (2066)..(2066): n is a, c, g, or t
  misc_feature (2068)..(2070): n is a, c, g, or t
  misc_feature (2078)..(2079): n is a, c, g, or t
  misc_feature (2083)..(2083): n is a, c, g, or t
  misc_feature (2087)..(2087): n is a, c, g, or t
  misc_feature (2090)..(2090): n is a, c, g, or t
  misc_feature (2096)..(2096): n is a, c, g, or t
  misc_feature (2104)..(2104): n is a, c, g, or t
  misc_feature (2111)..(2112): n is a, c, g, or t
  misc_feature (2119)..(2119): n is a, c, g, or t
  misc_feature (2122)..(2123): n is a, c, g, or t
  misc_feature (2127)..(2127): n is a, c, g, or t
  misc_feature (2135)..(2135): n is a, c, g, or t
  misc_feature (2138)..(2139): n is a, c, g, or t
  misc_feature (2141)..(2141): n is a, c, g, or t
  misc_feature (2144)..(2145): n is a, c, g, or t
  misc_feature (2147)..(2150): n is a, c, g, or t
  misc_feature (2152)..(2153): n is a, c, g, or t
  misc_feature (2155)..(2155): n is a, c, g, or t
  misc_feature (2158)..(2158): n is a, c, g, or t
  misc_feature (2160)..(2162): n is a, c, g, or t
  misc_feature (2164)..(2166): n is a, c, g, or t
tcagctacgtaggccccccccctatttttttaatataaaataaaatattatattttaaatatatttattattttttcagcttgctgcactaaatcagttaagaaatatatttggactgggtaaacgtgaagccgaggcgatttcacttgatgttacgtcgaaggtatatcgcaaacgacttgcacaggctgttgcagatggtgagttagaaatggcagatagcaaagcagccttccttcaaaatctatgtgatgaacttcattttgatccacaaaaggccagtgaacttcatgaagaaatttatcggcaaaagcttcagaaatgtgtagctgatggggagctcaatgaggaagatgttgctgctttgttgaggttgcgtgtaatgctctgcataccgcaacagattgttgaaacagctcattcagatatatgtggcagtttgtttgaaaaggttgtgaaggaggcaatcgcatcaggggttgatggatatgatgctgaaatccagaaatcagtaagaaaagcagcacatggcctgcgacttactagggaggttgctatttctattgcgagcaaggcggtaaggaagatttttattaattacataaaacgtgcacgggcagctggaaatcgtacagagtctgcgaaagaactgaagaagatgatagccttcaacaccttagttgtaactaatttggtggaggacattaaaggggagtcagctgatatttcctctgaagaacctgtgaaagaggacattacacaaactgacgacgaagaatgggaatcacttcagacactcacccacgcgtcccacggctgcgagctgacggcagaggggggaaaacctggtcagacagaaattactctgaaagatgatcttcctgaaagggataggactgatctttacaagacatacttactttattgtctaactggtgaagtgacaagggttccatttggtgctcagatcactactaagaaggatgattctgagtatcttcttctaaatcagcttggtgggatcctgggattgagtagtcaagaaatagtggaagtgcacaggggtctagctgagcaggcttttaggcaacaggctgaggtaattttagccgatggacagttgacaaaggccagggtggagcagcttaataacctccagaaacaagtaggcttacctcaagaatatgctcagaaaataatcaagagtataaccactacaaaaatggcagctgccattgaaactgctgtaactcaagggaggctcaatatgaagcagataagggaacttaaggaagctgatgttgatttagacagtatggtatctgagaacttgagagagaccctcttcaaaaaaactgttgatgacattttctcatccggtactggagagtttgacactgaggaagtatatgaaaaaatcccgtcagatctcaacattaacaaagagaaggcacgaggtgttgttcatgagcttgcaaagggtagactatccaactctctgattcaggctgtctctctactaagacagagaaatcagcagggagtggtttcttcactcaatgacttgctggcatgtgacaaagcagtaccctcacagccagtttcatgggaagtgccagaggagctttctgatctatacaccatatacttgaagagtaatccaactcctgagaatttgtctcgtttgcaatatctgttgggtataaatgattccacagctgctgctcttagggagattggagatagattactcaatactactgcggaggaagagaagtttgtattctagtcttgtgataaaatgtttggcattttaggcacactagagaggctgcaagtccccttaattttgccattttttattttccattttgtttaacggtagcagaaaaagaatatcacgatgtataaactttggaatagagatgagtgcagtgctgaaatcttagataatattttgtttgagacagttgaattaatcaattgctattttttatgaatgaaaataagttttcataaaaaaaaaaaaaaaaaaaaaaaaaaaagaccgggggnntccantattntnnnggggcccnntccncggnggntttccnccttttcntcctttnntgggggntanntcgnatccttgncgnntnttnngnnnntnngnttntnnngnnnc

SEQ ID NO: 8402 - DNA, 1458 bp, Glycine max
tcagctacgtaggcccccccccccgttcgtgtatactcaatagggtaggaggccgcacatcactgccgcgccactcgtcgtggtgtccttgccgcacatcacttcgttgtgtcatcttctttcaacaatcaatcaccgcttcctctctcactttccctaacttcgaagtcaccaacttcttatatttcaagacaaaaggaatggtgggtttatctcttggagaaacacatttcatccaaggtggcattgctcaagatcttcgttgtgatggtagaaagagattgacatatcgaccaatctctgttgaaactggagtgattccccagaccaatggttcagcaagagtcagaatgggtgccacagatgtcattgccagcgttaaggctgaacttggaaagccaagcttgttgcaacctgacaaaggaaaagtctctatatatgttgattgcagttcaacagcagagccagcttttgagggtagagggggtgatgagttggcagcagaactgtcaaatgctcttcaacgctgtctcttgggtggtaaaagtggagcaggtgctggaattgatctctcatcgcttattgttgtcgaaggaaaaatttgttgggatctttacatagatgggcttgttgttagttcagatggaaatttgttggatgctctaggcgctgccattaaggctgctttgagcaatacaggtattccaagagtccaagttgctgctggaacatcaaatgatgagcatccagaagttgacgtaagcgatgaggagtttctgcagtttgacacatcaagagtccctgtcatagttacactgactaaggttgggaggcactatattgtagatgcaacatcagaagaggaatcacaaatgagctctgctgtttctatttctgttaataggcaagggcacatctgcggcataaccaaacgtggaggtgtagggctggatccaagcatcattcttgatatgatatctgtggctaagcatgtaagcgagcaattaataaacaaattggattcagaaatagcttctgctgaagctgaagaggagtcatgacagagaagcacttagtgataactagggtgtaccgaatacttcaattattttggacaaaattttgtaactgaatagagggattaaagatattaagtgtatgttcgaaattgttataacttctgagctatgtggtcctgactttagctttgagatggttgtttaatgccatgcaaaactgacattgcattgtgacattaaagactgacatggctcacaatgtttggatcaggtttgtaatagcaagatgctgcctttgcaaattgcaatagtcaggtgatatggaccatgtgatttaaattgtcactttttttgttttccatactttagcttacgtgtaattttagtctctctaggtctaactgcttgaacttagtcaatagtcattgtagttttttaa

SEQ ID NO: 8403 - DNA, 823 bp, Glycine max
tcgttcgcccgcgagagccccacaggcgggggccgttgcctctgcctctcacccgcagggtttagagaaaatttaacaattagggttgcttctcctttgccgacccatggctcccaaagctgatagttcaaagaaggctgatccaaaggcacaggccttgaaaactgccaaggcagttaagtccggtgctaactttaagaagaagaccaagaagatccgaacatctgttaccttccatcgaccaaggactttgaaaaaggataggaaccccaaatatccacgcattagtgctccacccaggaacaagcttgatcactatcagatattgaagtttcctctcacgactgagtctgcaatgaagaagattgaagacaacaacactttggttttcattgttgacttgcgggccgacaagaagaagatcaaggatgcagtcaagaagatgtatgatattcaggccaagaaagtaaacaccttgatcaggcctgatggaaccaagaaggcctatgtcaggttgacacctgattatgacgccctggatgtggccaacaagattggaattatctaaactaatatatggcctcaccaaagtagatttctgtttagatggtagtttgttatggggtgttgaggggagacatttgaagcaacattaagttataaattttcggtttgttatctggtgtattttagttcaattggaattatatttacttttgttacaattttcaatttgatgagtaaatgggccgatattattttccaaaaaaaaaaaaaaaaaaaaaaaaaacgcgagactagttctcccgttattgccaaggac

SEQ ID NO: 8404 - DNA, 3077 bp, Glycine max
  misc_feature (3075)..(3076): n is a, c, g, or t
ccgcaacgaaggcggcttctctcgtctcgtctctgcttttctcctttcgctttcgcttttcgtgtcgccgccgggcgaaaaagtgtttccctgagaagagaattttgcaaatatggttccaccaaggggtttgagcaccatacgaatggttctttcggcgtggaagtgggtggttctcgcaaccatcacttcgcttgttcaggagagacgcggttccatgttgaaaaagcaggaaggtgagatttgtgttgaacacgagcttgcccctgtggtgccaccgccagagaagagaagaaagttttctccaatcatatgggacctagcagagaaggaagaaagagtctcttcaaagagtgggatcttgcagattgctgctctgtctcctccttgtccatttctatctagcagtcctggagccaatggtgttgattgtggggatgttatggaggagcctttgacagattcgggaagctacccacacgatttggaggaagacaaagatgtgcaaggatggacaatcacaaagtcaagatgggcttgtgatgttcgtccctcaccaagaggtgctgatgatgaacagaagcacggcaaagtgagctccagtcctgaaattggtgaattccatggcggtggaacttcagagagcacaatcactagatcatcaggaagtagtggtagagatcattatttgggtgcttcttctgatgacactgattctgaaaaggacttccttatggactccatggtcaatgttgaggaacaaagtgatgatggtgattctccatcggattctgatgagtgtggtggattgatgcatgtgctgagaaacataaacatgcttcagagttgcagaagtgtgtgtgagtttgagatgattaagaaaataaacgaaggctcacgcgtccggttgtctacaaggctagggataagaagctggagaactagtagcattgaagaaggtgaagatgaacatagagagggatggatttccaatgtcatccttgagagaaataaacattctcttgtcttttaatcatccctccattgtgaatgttaaagaagtagttgttgatgattttgatggtacttttatggtaatggagcacatggagtatgacctgaaggggctgatggaggttaagaagcatccctttagcatgagtgaaattaaatccttggtacggcaacttcttgaaggtgtcaagtatctccatgataattgggttatccatagggacttgaaatcatcaaacatcctgctgaaccatgatggggagcttaaaatatgcgactttgggttgtcaaggcagtatggaagcccgctgaagccatatactcctgttgtggttacactatggtacagagcacctgaacttttgctgggtgctaaagaatactcaactgcaattgacatgtggtcagtgggttgcataatggctgaattaattgccaaggaacctctgttcaggggtaaaagtgaacttgaacaacttgataagatttttcgaaccctgggtacgcctgatgagaaaatttggccaggattatccaaattacctggggctaaagcaaattttgttaagcaactgtttaatacactaaggaagaagtttccagctgcgtcgtttattggtttgccagttttatctgagcttggatttgacttgttgcagcagctgctaacttatgaccctgaaaagaggataacagcagaagatgctctccttcatgattggttccatgaagcccctcttcccaaatctgatttcaagccaatttttccttcttggcagtgataggacaggtactcttgctggatgcatgaaataccaagaacaatgctatttttactgtcattatttccaactttgtcttccttgttgatgatcatatacaaagaatgatatatgattgcaaggaacagggtaatggacttcattaggctcttgtttgttataaattagattagaagcagcaaattgatgtatagatctgagaaggtatgacattacccgacttttttttcctttactaaaacaaatgtatcctctcttgtgctggtgaaaatcatgtacatacatttcaggactatttagtaatagatgatggatttttgctctggtatgttgttttccttcctgtaccatctatttccatttacaatggtttgttcctatccttttagctgccccattaaattgggggctatcaagacttgttcttttttctcctacatttaatctttacaacaggaaatgctcctgaaaattttggcttcattgatgcacaagcattggtagctgttggatgtgtagaaaaataaatcaattgcaaggaatattcattttgagcatggtcagcaggtaatgatgttaggtttctcaatttgaaagtggttccctgaaataaaatgatagtgttgttggcttttattaataatgtctcttttttcacacttccatattatgttgctcaacaaaataaaaggatctaaattcttttttactgtacaagttcaatttgaaacttttgatatacagtaactgtcagcaagataacgtgatgtaatcttcatggttatgctatcgagttttgttccttttttgcctacatttaatttttacaccaggaaatgctcttttaaaaattttgggtgcattgatgtgccaagcattgatagttgttggacttgtagaaaaataaatcaattgcaagcaatactcattttcaacatggtcaacagaggtggaattatgagtttaggcagtggattgcatgttgaactatggtgaagcagggtttagaagcttgtggagctgctgagaaaagagacacaggctgttacatagatggcgaagtccaccaagggtgctgaagtgaaatttgcgctcaatttgtgccttcttaacactgcaattggtgtaataatttgatgaagttcaagggaagtagcctcttgtaatgaggagatttttgttttttgtattgaaaatcctgtggtgatgaataatttatatcccttaattacagtggggtcttgtggaggctggtgaaggaatattgaagctatggagnnc

SEQ ID NO: 8405 - DNA, 3053 bp, Glycine max
  misc_feature (3021)..(3021): n is a, c, g, or t
accacgcgtccgcccacgcctccggaacgaaccaaacgcgtcaacgaaggcggcttctctctctcgtctcagcttttctcctttcgttcgctttcgcttttcgtgtcgccggtaaggcaattcgatacctctgaaccctaatcagacgcagccaccgtttagggtttccatcctcctctcatactttgcctgattgctttcgtgtttcgtttctctcttttcatttcaatttttgatacggtccgctgttgattgtattatatcctggaaaaagtaaagaacattataattggtttttgtcgtgtggatttttgaatgattgattagggttgtgtgaatcattgaaaaaaaattgaatcctccgttctgatttttccggagggttagggtttggaaatttggggatttttttagggtttgggtttgaaatacatttctcttcgattcttaattgcttattgagaagacttgtgcttgtgcttgtcaatcacatggaggcagggcgaaaaagtgtttctctgagaagagaattttgcaaatatggttccaccatcgggtttgatcaccatagcactcgttctttcgatgtggaagtgggtggttctcgcaaccaccacttgtctcgttcgggagtggagcggttccatgttgaaaaagaggaaggtgagatctatgttgaacacgagcttgcctctgtggtgccaccgcccgagaagaagaggaagttttctccaattatatgggacctagcagtgaaggaagaaagagtctcttcaaagagtaggatctcgcagattgctgctctgtctcctcctcgtccatctctacctagcagtcctggagcctatgttgttgattgtgggaatgttatggaggagtttttgccagattcacgaagctacaaacaagatgtggaggaagagaatgatgtgcaaggttggacaatcaaaaagtcaagatgggattgtgatgatgttccgtcaccaaggggggctgatgaaaaacagaagcacggtaaagtgagctccagtcctgaaattggtggtggatcgtcggagagcacaatcactagatcatcaggaagcaatggaagagatcattattcgggtgcttcgtctgatgacaccgattctgaaaaggacttccttttggattccatggtcgatgttgaggaacaaagtgatgatgattattctctgtcagattctgatgagactggtggactgatgcatgggcagagaaacataaacatgcttcagagttgcagaagtgtgtgcgagtttgagatgattaagaagataaacgaaggaacttatggtgttgtctacaaggctagggataagaagactggagaactagtggcattgaagaaggtaaagacgaacatagagagggatggctatccgatgtcatccttgagggaaataaacattctcttgtcttttaatcatccctccattgtgaatgttaaagaagtagttgttgatgattttgatggtacttttatggtaatggagcacatggagtatgaccttaaggggctgatggaggttaagaagcagccctttagcatgagtgaaattaaatcgttgatgcgacaacttcttgaaggtgtcaagtatctccatgataattgggttatccatagggacttgaagtcatcaaacatcctgcttaaccatgatggggagcttaaaatatgtgactttgggttgtcaaggcagtatggaagtccgctgaagccatatactcctcttgtggttacactatggtacagagcacctgaacttttgctgggtgctaaagaatactcaacatcaattgacatgtggtcagtgggttgcataatggctgaattaattgtcaaggagcctctgttcaggggtaaaagtgaacttgaacaactcgacaagatttttcgaaccctgggtacacccgacgagaaaatttggccaggattatccaaattacctggggctaaagcaaattttgttaagcaaccgattaatacactaagaaagaagtttccagccgcgtcatttactggtttgccagttttatctgagctgggatttgacttgttgaagcggctgctaacttatgaccctgaaaagaggataacagccgaagatgctctccttcatgattggttccatgaagcccctcttcccaaatctgatttcaagccaatttttccttcttggcagtgatgggacaggtactcttgctggatgcatgaaataccaagatcaatgctatttttactgtcattatttccaactttgtcttaccttgttaatgatcatatacaaagaatgatatgattgcaagggacagggtaatggacttcattaggctcttgtttgttataaattagattagaagcggcagattgatgtatagacctgagaaggtatggcattacctgatttttttcctttactgaaacaaaaatgtatcctctcttgtgctggtgaaaatgatgtacatacatttcaggacaatttagtaatagatgatggatatttgctctggtatgttcttatccttcctataccattttcacaatggtttgttcttatccttatggctgccccatttaatttgggactatcaaattttgttcttttttcttctacatttaatttttacatcaggaaatgctcttaaaaaatttgggtgcattgatgcacaagcattggtagctgttggatatgtagaaaaataaaccgattgcaaggaacattcattttgaacatgatcaacaggtaacgaggttgggtttctcactttgaaagttgcttcctgaaataaaatgatgtgttgtggcttattaaaaacagtgtgcaagattttgggggctatcgaggtttgttctttttctcctacgtttgatttttacagcaggaaatgctcctgaaaattttgggtgcattgatgcacaagcattgagctgttggattgtggtcttgtcgcagataagttggaactggaggggtgaaatgagttcacccccccccngcgcccccccgctgcacttcgcccccccccca

SEQ ID NO: 8406 - DNA, 991 bp, Glycine max
ctatagttcttcctttaatacttaaatgagatatacaccatgtccatgatatacataatgacaatccttttagctactgcctttacaggactaccagtaatgattgtttgcactgtatttcagattcagacgatgccacaactttcgtgagcaattagcttggtacaatgataatcagttcatctttggttcagtttggcaacctcttagagagattttgaaaaataagttgatattatgtttcacctttccaccatggatgcttgccagagaaaggatacaataactgaagaatggagagctctgacgtgctggcatccactcaggcaaaatattaacactgccactctgctagtgggaacactgactgggctataaggtggcaaaaatccacgcacttgaaaatgtggaaagtaattccacatacttttctggagtgctatatctgtgagtccacaggaaggagtatgcagctttctgtaataaagtgtgttcctcgtggatgcatagcagcataggacaaggcaaggtgtgaattgaagtactgaactccaacaagatcatttcatatatcatgttaattttgtaaattggctatttgtgatttgtccatacgtgcttgccccaattcatttttctaatgatttgagcatacccgcaactcttagttcttgaatagcacatttatatgtattttttttcactttattttctgtacgggcaactcaatgctctaagaacttcaaagcagtgtactaggaagaagctcgttatactacattatgagtttctcctttgattcctcattttaaaataataataattattataatttattttgtaaattcatttcctatgtagttccagttagttttttttttttttggaaaacattaccaggtcccctgaaggaaggttagtggaaatgttaaaaaaaacaggagaaatttgtataattgtataaaacttcagggaaattgaggtaatttac

SEQ ID NO: 8407 - DNA, 1496 bp, Glycine max
  misc_feature (1484)..(1490): n is a, c, g, or t
  misc_feature (1493)..(1495): n is a, c, g, or t
cggacgcttgggcgcgttctctctatgagaattgagattcagctacggaagccccccgccgacattggaagaatgcatcaccgcgttgtgttgtgattgaaaatggagagcgatgttgaagaatctatgcggaagaggcccagaaaatatcctttctccgccgattcatcctctcgcaagcaatttgaacaatattctggacggacatttgcaattatgggggaagtgaattttatgcaagatgatgataatcgtttggagattacccgaactaaatttggaagtttgcttaaaagacacggagatttgacagagcggcttgctagggattctgacaagataatatttgagcgtctacagaaggagtttgaagctgcacgagcttctcaaactgaagagatatgtttagacggggaagagtggaatgatggactactagctacaataagagagcgggtgcatatggaggcagacagaaaagcaatgcatggggatgctgacatattagcatgtcctcaggataaaattacatataaaattggaaacaaggtaatttgctgtttggaaggggcaagaatcggcgtacaatatgagacatcgtttgctggtgaaccttgtgagttttaccattgtgtgctggagagcaagtcatttcttgaaaagatgactgtccttgaacacacagttccatttttcctgccaatacgagaaatagaaaatgatctcctttcatccaatgcaatgaaattcatagatcatgttggagatctattgcaggcttttgtggatagacgggaacaggtcagacttataaaggagctgtatggaaatcaaattagagagctgtatcatagccttccctaccatatgatcgaatttgtattggatgattctgattgcaaggtgacagtcagccttagatatgcagatctcatttcggtgcttccaactcgaatttcagtgctagcctggcctatgttcaataaaaatactatggctactttgagcaggaaggaagatggactctcaggaagtcattcttctccaattcgcttaacctatgcagaagatgccttacgaaccatgagtttacctgaagcatatgcagagattgtattaaacttaccacaggcgcttcagcagacgtatcatcaaaaagcccctgcttagagcttcgccctttgagtagcctagatgcatcagtaaaaattcttggtagagatgttaaatattagataaacaacttcagaattattacctattcacctagccaaattgctcataggttgagttcattttgctgtaatattgtcatatagcatttagcatttgtatttcggcctctctggcctcgttattccttcaatacctgctacggtgtcttgtatcattaatacaacagggctaggtttacatctattcaaactgttgtcattcatcttttctccataattcaacatgtatgtaatttgatttcatataannnnnnnctnnnt

SEQ ID NO: 8408 - DNA, 1624 bp, Glycine max
tcagctacgtaggcccccccccccgaataacaaacttgtaatatcataagttcagtaccaccaagcaaggcaaaagagaagcaactttgaaaactcaatggctgcaacttattatttactgccaacaagtccgaaaactttctcacctttcctcagaaacccaccttccattccttcaggtcatcatgtttcactgttgggttcattattggactatccattccattgttccagcagaagaggaaacaatagtgttgaggccaattgcaatgcaaaaaagaagaacccttggttagacccttttgatgatggggaggatcctgagatggagtatggttccttgtttgcagatgggaagcaggaggaggatcctaggccacctgatgaccctgacaacccttatggattcttgaagttcccttctggatattctgtggagatagcatccttggcattgaaagtgagaggggatgtgaggagatgctgctgtgtgatatctggtggtgtttatgagaacctcttgttctttccggctattcagctgatcaaggataggtaccctggtgttcagattgatgtggtggcatccgagagggggaagcagacctatgagttgaataagaatgtgaggtgggctaatgcttatgaccctgatgatgagtttccagagcctgctgagtatactgatatggttggagttctaaagaataggtactatgacatggtcttaagcaccaaattggcaggccttggccatgcagcatttttgtttatgacaactgcccgagatagagttagctatatctacccaaatgtgaatgccgcaggagcaggattacttctatctgaaacattcgtcccagatagtcaaaatctctcagacggaggatataatatgtaccatcagatggttgactggctaggaaaaccatttcgagaagttccaagacaaccagtgccaccacttagggtatcaatctcaaagaagttgaaggaggttgttgaggcaaaatacgaaaaagcaggtgcaaaaaaaggaaaatatgttgtcattcacggtataaaatcagattcaaaggcctccatgcagtctaggggtgatcctgatagcttgctacccattgaagtgtgggctgaaattgctgacgttataagggatgttacgccactttttgtcattccgcatgaaaaagaaagggaaaatgtggaggaaatattttcagaagatgcatctattgtcttcatcaccacccctggacagctagctgctcttattaatgactcagctggagtgatagctacaaatacaactgctgttcagcttgcaaatgcacgcgagaaaccttgtattgcactattttgctctgaagagaagggaaacaagtttgttccgcgggctgaagagaagaaatgtattataatatcatccaagacaggaaagttaatagatattgatgttgaggctgtaaaaaacgcagttcaaacattcaatttgtctccagctttagtatagtggaagagggaaaagggaaagtgttctgaacttctggttaagtgattatattaactgtctttttttaattaataaagacaaatgtatatctacaaaaaaaaaaaaaaaaaa

SEQ ID NO: 8409 - DNA, 746 bp, Glycine max
gtgtgtgtgtgtgttgggttgcttggccttgtttatcaaccaaatctagagaaacccatttctctgttctcccatttgaaggaaaggaaagcttacacctctctctccaactactgattcgctccaattccgccgcgcccagattcttctctcttagctacaaacccggtcgtctaggactctttccaacaaggtctttccttcaactcctatggcaggagaaacatcttggatcagccactatgatgacagacaaagggagactggggcgtttgattcatttttagaacttagtgaggaaggtgaaaaagaagcaactgctgtttctttggatgttttgccggatgacttgttggagcgaattctagcctatctccccattgcaagcatttttagagctggctgtgtgtctaagaggtggcatgaaattgttaactcagagaggtttgtatggaacctttcacatgttctaccgcagaaaccttggtactttatgtttacaagctctgatgaaccaggaggtcatgcttttgatcccctccttcggaaatggtatagcattgaacttccatgcattggaacttctaaattggttcattgcttcatcatatggcatggtctgcttcatggacaatgacagcagaagtgaattatgcatctgcgacccaattaccaaaacctacaggaagcttgaggagcctgcacgtttgaaattttctgattacagtgcattagcaatctcagtg

SEQ ID NO: 8410 - DNA, 1613 bp, Glycine max
  misc_feature (7)..(8): n is a, c, g, or t
gtaggcnnccccccgaacacacacattaacccagggggaggataagacccccccctctctctccctcaccaaaaaaagaaagaagaaaaaaaatctcaaaataaaacaaccaaaccacacacttcacaccctcttcaacatcctcagcaagtacaagaacaagaagaaacaatgtcttgctccaatctcacaatgttggtgtcctcaaaaccttccctttccgatccctccaatctctccttccgctctgtcctcaacccttttcagctcccttcacaaaacccaacttcatgcactccttcacgctcctcaaccacccaaattcagtgtggtctgagagaactcagaacccgcattgattccgtgaagaacactcagaaaatcaccgaggctatgaagcttgtggctgcagccaaagtgagaagagctcaagaagctgttgtcaacggaagacccttctcagagaccctcgttgaagtcctctacaacatcaacgagcagctcctaactgaggacgtagacatccctctcacaaaggttaggcctgtcaagaaagttgcacttgttgtggtcaccggcgaccgtggtctctgcggcggtttcaacaacgcaatcataaagaaagctgaggctagaatcagggaattgaaggagcttggcttggaattcactgtcataagtgttggcaagaagggtaactcttatttcatcagaaggccttatattccggttgacaggtttctagaaggtggcacacttccaactgctaaggaagctcaggccattgctgatgatgttttctcactctttgtgagtgaagaggttgacaaggtggagcttctatacaccaagttcgtgtcgttggtgaaatcggatcccgtgattcataccttgcttcctctttcgccaaagggagagatttgtgatgtgaatggtgtgtgtgttgatgctgctgaggatgagttcttcaggttgactaccaaggaaggaaagttgactgtggagagagatgttgtgaggactaaaaccgcggatttttcgccaattttgcagtttgaacaagaccccgttcagatccttgatgcactgctgccactgtatttgaacagccaggttctgagggcattgcaggagtccttggcgagtgaactcgccgccagaatgagtgccatgagcaatgccacagataatgctattgagttgaagaagaacttgtccattgtgtacaatagggagcgccaggctaagatcactggtgaaattctggaaattgtggctggtgccaatgccttgcaatagtgcaatttgtaggtattgtttacttattataatgatgggtggtggttgcccttttcattttctaatgtggttatctaagacacttgtgcaatttttacgcttctgttgaaacttgaatgaaatgcgcaggctttgtgcaataggaaaaatgcgatcaaatctgaagcggacacttttttttttgttatgtttttttttttccttctgaattatgtatgtaatgaatcaataatagatctataatataaagattcagagagttatctctgttgatttgaaaaaaaaaaaaaaaaaaaaaaaaaaaaaaaaaataa

SEQ ID NO: 8411 - DNA, 1617 bp, Glycine max
aacccaacacaacacacacattaacacaaggagaggataagacccctctctctctcacacacacaaacacacaaaaaacaaagcaaaaaaaaatctcaaaataaaacaaccaaaccacacacctcacaccctcttcaacatcctcagcaagaacaagaagaagaagaagaaacaatgtcttgctccaatctgacaatgttggtgtcctcaaaaccttccctttccgacccctcgaacctctccttccgctctgtcctgaacccttttcagctccctacacaaaacccagcttcatgcaccccttcacgctcctcaagcacccaaattcagtgtggtctgagagaactgagaacccgcattgagtctgtgaagaacacgcagaaaatcacggaggcaatgaagcttgttgctgcagccaaagtgagaagagctcaagaagctgttgtgaacggaagacccttctcagagaccctggttgaagtcctctacaacatcaacgagcagctccaaactgaggacgtagacatccctctcacaaaggttagacctgtcaagaaagttgcacttgttgtgatcaccggcgaccgcggcctctgcggcggtttcaacaacgcaatcataaagaaagccgaggctagaatcagggaattgaaggagcttggcttgcaatttactgtcataagtgttggcaagaagggtaactcttatttcatccgaaggccttatattcctgttgacaagttccttgaaggtggcactcttccaactgctaaggaggctcaggccattgctgatgatgttttctcactgtttgtcagtgaagaggttgacaaggtggagcttctctacaccaagttcgtgtcgcttgtcaaatcggatcccgtgattcacaccttgctcccgctttcgccaaagggagagatttgtgatatcaatggtgtgtgtgttgatgctgctgaggatgagttcttcaggttgactaccaaggaaggaaagttgactgtggagagggatgttgtgaggactaaaaccatcgatttttcgccaattttgcagttcgaacaagacccggttcagatccttgatgcactgttgccactgtatttgaacagccaggtcctgagggcattgcaggagtccttggcgagtgaacttgccgcgagaatgagtgccatgagcaatgccacggataatgctattgaattgaagaagaacttgtccattgtgtacaatagggagcgccaggctaaaatcactggtgaaattctggaaattgtggctggggccaatgccttgcaatagtgcagtttgtaggtattgtttacttattataatgatgatgggtggtggttgcccatttcatttactaatgtgtttgtctctaagatacttgttcaatttttacgcttctgttgaaacttgaatgaaatgcgcaggctttgtgcaatagggaaaactgtgatttatatctgaagcggacattttttttgtttatgtatttttttttttttttgccttctgaatgatgtatgtaacgaatcaataatagatctataatataaagattcagagagttctctctgttgatttaaaaaaaaaaaaaaaaaaaaaaaaaaa

SEQ ID NO: 8412 - DNA, 1290 bp, Glycine max
attaagcagggtaagggtcattgtcccctcccataactcccatctaaacaattacaaaagttaagctgtaacgaccatacatctctgcctgaaatgaatccatctaggcaccagtagagagacatttactaccatatatccgaacatgcaattgagagggcttttcaccaaagacatcgaacgatgcaaaatcggaagatattaggattttcctcaacatccaaaaactatcattcttaggtcaatcaagcagcagcaatcagcacatgccacttaaagtgacacaaacattggtcaataggggtctgtctatgatctccacaaaaagcaacaaatccagaaatgataggttccagagaaggtagtaatgtaatttattatagacttatagtaatgatccattcatataaaaatgtagcagcaaacatcagaaacatgtcaccaacaagtattcattggttgactttcacattttttttatatattaacacttcttccagatctgggagtaatcataaatagctaaaacattcatgtttaatgttatggcagccattaatcacaatgacaacacagttttaacacgggacaaaagaagaaacatctgccatagtaaaaatagttcataaatttagctgatgcaaccctagagaagaggtggatattgctttgcctgctggcggacccttctcttgtactctgctgcatcctggatgaatagatgatagccttctgtctgggcagggtcagcaggatttggctggtcaagtaagtcttggatgcccacgagaatttgcttaactgttatggctggcctccacccactatcctcgttaagtatagacaagcaaacagtcccagaaggataaacattagggtggaagaaaccttgtgggaatttacactttggaggcttgctagggtagtcttcactaaagtgcagcgtaagtgggaagtagccaccctcccaatcagtcccagtcttcccgggaatagtgcaatgccacaccatcaaattcacggttccatcgggcagcgtctccggcttcgcaacaaaaccatggggatggttcttccgccacgacttgcgctcctcggtgaggcgtccacgagcgataccaccagacattacgcaacaacactttccactccctccgagtcaactcagtgcttccgtccgagttcgataagcgcttctttctcttttgccccttctcttcgctctgccgcgttgtgttgtggttgtgagtcccctcctctcaccccctcgcggcgccgtgtattgccgcg

SEQ ID NO: 8413 - DNA, 1482 bp, Glycine max
tcgagtcagctacgtaggcccccccccccccgaagaaagaagaaagaaaggaaagaggtgtgaagtgtgtgagtctgagagaagagaacttagagaaatggaactacgtgagcttggaagaaccggactgaaactcagcactgtaggattcggagcttctccactgggcaatgtcttcggcgatgtttccgaggaacaagccaacgcttccgttcgcctcgctttccaatccggcatcaatttcttcgacacttctccgtactacggagggacactgtcggaaaaagttctgggaaaggcactgaaggctctgggagctccgaggaactcgtacgttgtggcaacgaagtgcggacggtacaaggagggtttcgatttcagcgcggagagagtgacgagaagcattgaagagagcttggaaaggttgcagcttgactacgtcgacattctccaatgccacgacatcgagttcggctccttagaccaggttgtgaatgagacgattccagcgcttgtgaagctgaaggaagcagggaaggcgcggttcattggaataacagggcttcctctggggattttcagttacgtgcttgatagggttccgcctgggacgctggatgttgtgctttcatattgccattactgtgtgaatgacactagcttgggggatttggtgccctatttgaagaccaaaggggttggcattatcaatgcttctcccttgtctatgggccttctcaccgagtctggcccgcctgaatggcatcccgcatcactggaactcaagtctgcatgtcaagctgctgctacccattgtaaagaaaaaggaaaaaacatttcaaagttagcattgcagtacagcttgttaaataaggaaatcacatcagtgcttgtaggcatgaagtctgttgaacaggtggaggaaaatgttgctgccgcaagagaacttgcaacttctggaattgatgaagagactctgtctgaagtcgaagctattctgaagcctgttaaaaaccagtcgtggccaagtggaatccagcagagctgatgtttattttaccacctggtattacctatggagacatccattcctgttgttgacaatgttcttcactcaaataatccgattcaataagagaaattgctttgaaagtattaggatccactgtctcaataatttttgtttgtaatctagagtgtccaataatacatttctcactagaatgctattcatcttcggcttctggagagtaagagcctgtcttctaggtgaacccgtaaatagttggttgaactggtttgtaaaagcacaatgtaaaaaaaaatggcaataatttgttctcctttacatgttatttttttaaatttaattagaatatagtcagtgtaaaccttttgcacatggtcaagcaattttgcactgtcatatcattttctaggcttaaatatattggagattcttagaaaaaaaaaaaaaaaaaa

SEQ ID NO: 8414 - DNA, 1478 bp, Glycine max
atgtgaggattgggtcagatatgagacaatccaatagttacagatttctctggataacgcatatcatgttcatgtgaccttgtacactccaccacataacttgaataacttccatttaattttctgcttttgcattctctctctcgacaccaaacaaaggtagttgtgattgcagcaaacaatgggtgtctccttcctctcgacttgcccttccctgcttccactcgttgcttatgatacaccaccctccaccagataccaacctcgttcagtgtccatttgttgtaataaaaccataagcaatgttagtgatgaagagccgttccattggagaaggagagaaattcttaaatgcgctggggcaaccgttggcttggaattgattggaagctccggatcgcttgttggaatggctaatgctgctgacttgatacagcgcagacagcgttctgaatttcaatctaaggttaaggaaacactttttacagccataaagggaaatcctgatcttatcccatccttactgacactggctctaaatgatgctttgacttatgataaggcaacaaaatcgggtggtccaaatggctctatacggttcagctcagaaataggtagaccagaaaatacagggctttctgctgccatgaatttattagaggaagcaaaaaaggaaatagactcatattccaaaggtggacccatttcctatgcagatctgatccactttgcagcgcaaagtgctgccaaggctacatttttagctgctgccattcgaaaatgtggtggaaatgaggagaaagggaaaacactgtacaatgcatacggatcgaatgggcagtggggtttgttcgataggcaatttggtagggctgatactcaagacccagatccagagggaagagttccaatatgggagaaggcaagtgtacaggaaatgaaagacaagtttgttgctgtaggctttggtcctcgccagctggctgttttatctgcattcttaggtcctgatcagactgcaacagagaccttattggccactgatcctgatgttgctccatgggttcagaaataccaacggagccgtgaaacagtctctcagacagattatgaggttgatctgataaccactttcacaaaactgagtaccttgggccaacaaatcaactatgaggcatatacatatcctccaccaaagatcgacattaccaaactcaaattgtaaaagtaaagcatatggtagtaccatattattttcctcctcctcaagacagaccttgaatttcaagttttgacttattttaaaattttctctttttttttttaactggaaaccttgagcttctatgtaattattcatgcacatgtagtgagataattaagagtgttcaagaaacgatctaaatttgttacaaccactaaactgattaatagcgtgtttggagatgcttttggaggcagttttgacgtaaaaaaaa

SEQ ID NO: 8415 - DNA, 3360 bp, Glycine max
taaaaataaggacgcaggcaaatgtatgcatttggcataagtatataagagagagggagtagtactactgcaaagcaaaatcagagagacatgagaagctgtgtgtgctacacgctattattgtttattttcttcatatggctgcgcgtggcaacgtgctcttcgttcactgacatggaatcgcttctgaagctgaaggactccatgaaaggagataaagccaaagacgacgctctccatgactggaagtttttcccctcgctttctgcacactgtttcttttcaggcgtaaaatgcgaccgagaacttcgagtcgttgctatcaacgtctcgtttgttcctctcttcggtcaccttccgccggagatcggacaattggacaaactcgagaacctcaccgtctcgcagaacaacctcaccggcgtacttcccaaggagctcgccgccctcacttccctcaagcacctcaacatctctcacaacgtcttctccggccatttccccggccaaattatccttccgatgacgaaactggaggtcctcgacgtctacgacaacaacttcaccggaccgcttcccgtagagttggtgaaactggagaaattaaaatacctgaagctcgacggaaactatttctccggcagcataccggagagttactcggagtttaagagcttggagtttttaagcttaagcaccaatagcttatcggggaagattcccaagagtttgtcgaagttgaagacgctgaggtacctaaaactcggatacaacaacgcttacgaaggtggaattccaccggagtttggcagcatgaaatctctgagataccttgacctctctagctgcaacctcagcggcgagattccaccgagccttgcaaatctgacaaaccttgacacgttgttcctgcaaattaacaacctcaccggaaccattccgtcggagctctccgctatggtgagcctcatgtcacttgatctctccatcaacgacctcaccggtgagataccgatgagcttctcacagcttagaaacctcactctcatgaacttcttccaaaacaatcttcgcggctcagttccgtccttcgtcggcgagcttccgaatctggaaacgctgcagctctgggataacaacttctccttcgtgctacctccgaaccttgggcaaaacggcaagttaaagttcttcgacgtcatcaagaatcacttcaccgggttgatccctcgagatttgtgtaagagtgggaggttacaaacgatcatgatcacagataacttcttccgcggtccaatccctaacgagattggtaactgcaagtctctcaccaagatccgagcctccaataactaccttaacggcgtggttccgtcagggattttcaaactaccttctgtcacgataatcgagctggccaataaccgttttaacggcgaactgcctcctgagatttccggcgaatccctggggattctcactctttccaacaacttattcagtgggaaaattcccccagcgttgaagaacttgagggcactgcagactctctcacttgacgcaaacgagttcgttggagaaataccgggagaggtttttgacctaccgatgctgactgtggtcaacataagcggcaacaatctaaccggaccaatcccaacgacgttgactcgctgcgtttcactcaccgccgtggacctcagccggaacatgcttgaagggaagattccgaagggaatcaaaaacctcacggacttgagcattttcaatgtgtcgataaaccaaatttcagggccagtccctgaggagattcgcttcatgttgagtctcaccacattggatctatccaacaacaatttcatcggcaaggtcccaaccgggggtcagttcgcggtcttcagcgagaaatcctttgcagggaaccccaacctctgtacctcccactcttgcccgaattcctcgttgtaccctgacgacgccttgaagaagaggcgcggcccttggagtttgaaatccacgagggtgatagtcatcgtgattgcactgggcacagccgcgctgctggtggcggtgacggtgtacatgatgaggaggaggaagatgaaccttgcgaagacgtggaagctgacggcgttccagcggctgaacttcaaagccgaggacgtggtggagtgtctgaaggaggagaacataataggaaaaggaggggcagggatcgtgtaccgcgggtccatgccaaacggaacagacgtggcgataaagcggttggttggggcggggagtggaaggaacgattacgggttcaaagcggagatagagacggtggggaagataaggcacaggaacataatgaggcttttgggttacgtgtcgaacaaggagacgaacttgcttctgtatgagtacatgccgaatgggagcttaggggagtggctgcatggtgccaagggaggtcatttaaagtgggaaatgaggtacaagattgcggtggaagctgcaaagggactatgctatttgcaccatgattgttcccctcttatcattcacagggatgtcaagtctaataatatattgctcgatgctgacttggaggcccatgttgctgattttggccttgccaagttcttgtacgaccctggcgcctctcagtccatgtcctccattgctggctcctacggctacattgctccagagtatgcatacactttgaaagtggacgagaaaagtgatgtgtacagctttggcgttgtgctgctggagctgataatagggaggaagccagtgggagagtttggagacggggtggacatcgttggatgggtcaacaaaacgagattggagctcgctcagccgtcggatgcagcgttggtgttggcagtggtggacccaaggttgagtgggtatccattgacaagtgtcatttacatgttcaacatagctatgatgtgtgttaaagaaatggggcccgctaggcctaccatgagggaagtcgttcatatgctctcagagcctcctcactctgctactcacactcacaacctaattaatctctagttaattaagttatttgctcatcgatccagaatcacttcttttcaaaataaattaacacagacgaaaactgtaggaataactttcatctgttgtttgtccgaagtgaaacaacgaatcaaatgtgaactatgtatcaaatgtaagataggttttaattaattttgtaatattggtgtcaactgtcaactgtcaagtaattcgaaggattttccccattgtgcatttatcaagaatttttgtagaaaagacttgttgtttataaaatatttgtgactgctactgtttcttctaaaaaaaaaaaaaaaa

SEQ ID NO: 8416 - DNA, 1324 bp, Glycine max
caaggatatctcagactttcaaacttcacctacgtaggccccccccccacagatgttgaattttcctgctggctgtgagctacatgaagcacttggaccagctttttcgaaagtgggtaaatgttttgattggccaacacaggttaatcaagaaatgaaacctgttgaaatgtcagatgagattagcactagccaattgacttctgaatcttgtccagaacatcttttggaagcaatgctggtcaacattaaccatagtaataatgatgttaatagtgaattatcattttgtacatcaaagcaatctgcaatggcctctgcaaaaaatcatgaagcttctattcacaatgtgcatactattaattcagaaggctatttgatggatcagctctctcttgtcagagaggacaaacaccattctttgagttcatcatcagggatatgtggtgtgatgtcctcaaaaggtgtttcatctacatttcatagttcaaatagtggacagcttgaaaggtcgtctgaaccatccaagaacagcaaaaaaagggccaggccaggggaaagttgtaggcctcggccacgggatagacaactgatccaagatcgtatcaaggagttgagggagctggtgccaaatggagcaaagtgcagtattgattcactcctggagcgtgcaataaagcacttgctctttctccaaagcataactaaacatgctgacaagctaactgactttgctgatacaaagtcaaagttgcatcacaaggaagcagacattcttggatcctctagttatgatcagggctcaagctgggccatggaggtagggggtcatctgaaagttcattcaatattagtggagaatcttggtaagaatggacaaatgcttgttgagatgctctgtgaggaatgcagccattttcttgaaatagcagaagccataagatcttgtggccgcttgttcaaatactgcaatccaaaagctcatggtgaaaagatatggatatgctttgtcgtcgagggtcaaaacaacaaaaatgtacacagattggatatcttgtggccgcttgttcaaatactgcaatccaagagcacggtgtattcacaataataacagtttggtttttggaaactatgtggccactcattggcaagtgtaactcattcttgatctttgaaatgaaatgatgtggttatgtgtgtgtttttaaatgattgaaatgtgtgattggcattgtttatgtttgacattgaaaatagcacaatacgttgaacatatattagtgtcacccctgccttccaaaaatcaataaataatattagtgcc

SEQ ID NO: 8417 - DNA, 1554 bp, Glycine max
cctcgtgccgacgaccccaactggcaacgcaatcggaagcgtcttgcagattgtggcattggttttggccgaaacgccatcggtggccgtgatggaaaattccctcgcgtccccggccccgggggtgatgaccctgtgaacccgaaacccggcacttcttcgccactgctgtgatccaggataagccacttgtggattgtgttcaagagggacatggttattcagctgaaacaagagctgatcatgaacagcttcaagacaattgatggtagaggagtcaatgtgcacattgctaatggagcatgcatcacaattcagtttgtaaccaatgttatcattcatggcttgcacattcatgattgcaaacctactggaaatgctatggtgagaagctccccaacacattttggttggaggacaatggctgatggagatgctatctccatatttggctcaagccacatttgggttgaccacaactccttgtcacactgtgcggatggccttgtggatgctgtcatgggctcaacagccattactatttccaacaaccacttcacccaccacaatgaggtgattctactaggccacagtgactcttacacaagagacaagctgatgcaagtgaccatcgcatacaaccatttcggagagggacttatccagagaatgccacgttgtagacatggatatttccacgtggtgaacaatgactacactcactgggagatgtatgctattggtggaagtgctaaccccaccatcaacagccagggcaacagatacaatgctcctactaacccttttgccaaggaggtgactaagagagtggaaacagcagaaacccaatggaagggttggaattggaggtcagagggagatttgttactgaatggggcctatttcactccatctggtgctggagcctcagccagctatgctagagcctctagcttaggagcaaaatcttcttccatggttgattccatgacttccaatgctggtgcactaggttgcaaaagaggccgtcagtgctagcatgtattatcaaccatagccatgtgaatgaaagaggccatccattatttttcttttgtgtttgattctcaagtttttaccatattatagtagaaaatcatcatcatcgtatccattgctttctttcctcacacctcgattaccatatcctgcatttttcttgacaagtgtacattaaattacacatgtcaatatggttttatgttggtaccccattgccacattgtgggtccccttggccgccttccttagctactcgacttgctccaactgaaacaagcaatgcaattgtagaaacgagtacagaagtatcatccattattgtcttcccttttcaattgttttcctttgtcgttcttgagtgcttcccagctgatctcatgtcatcaaccatggtgcgggggccgaccattcatatacatatgggtccaaatatcaaagtcatatctccttacatatgtaggagggcttgtgagatttataatatgtagaatggaatgagccagatctatatat

SEQ ID NO: 8418 - DNA, 2231 bp, Glycine max
tcgagtagctccggagccccccccccgagtccaccccccccatttctctctctctcttctcttttcctcttcaacattcttctctctcacaaagcaacaacacaaacaccgagcgaggggaattcaactttcagcaatggcggtttcttcttctgcaacaaaatgggtcctcttcttgcttctggcgctgctcattcgagaagaagccatggccatggctactaccccacagatctctgacctcaggaatgttgaagttgaaagacacaggttgccgagcttgacgaactcgtcaatggtggagagggcaaaagaggctgacaaattaaatgaacaagctgctgtggctaacccagaggaagtggtttcaatggttgagatgagcatccagaacagcacagagagaaggaagttgggatatttctcttgtggaacaggcaacccaattgatgattgctggcgttgtgaccccaactggcaacgcaaccggaagcgtctggcggattgtggcattggttttggccggaatgctatcggtggtcgtgatggaaaattttatgtggtgactgaccccagggatgatgaccctgtgaacccgaaacctggcactcttcgccatgctgtgatccaggacaggcccttgtggattgtgttcaagagggacatggttattcagctgaagcaggagctgatcatgaacagctttaagaccattgatgctagaggagtgaatgtgcacattgctaatggagcatgcatcacaattcagtttgtaaccaatgttatcattcatggcttgcacattcatgattgcaaacctactggaaatgctatggtgagaagctccccaacacattttggttggaggacaatggctgatggagatgctatctccatatttggctcaagccacatttgggttgaccacaactccttgtcacactgtgcggatggccttgtggatgctgtcatgggctcaacagccattactatttccaacaaccacttcacccaccacaatgaggtgattctactaggccacagtgactcttacacaaagagacaagctgatgcaagtgaccatcgcatacaaccattttggagagggacttatccagagaatgccacgttgtagacatggatatttccacgtggtgaacaatgactacactcactgggagatgtatgctattggtggaagtgctaaccccaccatcaacagccagggcaacagatacaatgctcctactaaccgttttgccaaggaggtgacaaagagagtggaaacagcagaaagtcagtggaagggttggaattggaggtcagagggagatttgttgctgaatggtgcctatttcacaccatctggtgctggagcctcagcaagctatgcaagagcctctagcttaggagcaaaatcttcttccatggttggttccatgacttccaatgctggtgcactaggttgcaaaagaggcagtcagtgctagcatatattatcatcaaccacaaccatgtgaatgaaagaggtcatccattatttttcttttgttgtttgattctcaaggttttaccatattatagtagaacatcatcatcatcatatatccataatccattgctttctttcctcacacctccatcatcatatcctgcagtattcttgacaagtgtacattaaattacacatgtcaatatggttttatgtgttacccctttgccacaccgtgtgtattgttgttggtcaaccttagctgctcgacttgctccagctgaaacaagcaatgcaattgtaggagcaggtgcagaagcgccatccattgttttcttccctttttcattcttactctttttttttttgcctttttcttcctttggtccttcccatctcatcccccccccccacaccaattcatatgcatatttttctcatgtctccttacatactgttcaatcattttcagttttataggatttgaattgaatgagtccaatatgatttttcttttactcccctgttattaatttactatttgttttgttagttaattatacaagcaaaaaaagcatgattgtcaaagtctagttacatggaaacactttatcaaggacgattatggaattgtaatagttgtggtgttgctttttaactttctcacctttttagcctctttcttcttgcctttgcaagtaatctttgcttttgttatgcaattatggttgtaaaccat

SEQ ID NO: 8419 - DNA, 2026 bp, Glycine max
  misc_feature (401)..(401): n is a, c, g, or t
  misc_feature (1937)..(1937): n is a, c, g, or t
  misc_feature (1941)..(1941): n is a, c, g, or t
  misc_feature (1944)..(1944): n is a, c, g, or t
  misc_feature (1953)..(1954): n is a, c, g, or t
  misc_feature (1967)..(1967): n is a, c, g, or t
  misc_feature (1986)..(1986): n is a, c, g, or t
  misc_feature (1988)..(1988): n is a, c, g, or t
  misc_feature (1994)..(1994): n is a, c, g, or t
  misc_feature (1996)..(1996): n is a, c, g, or t
  misc_feature (2006)..(2006): n is a, c, g, or t
cctgccgcagatcatgatagttgacctcaaattaacttatccaagtggcttggcaacagcggttctcatcaatggtttccatacacagggtgacaaaatggccaagtacagtatacttctcttttattcatcagctttcatttgttgcaatttgtagatgcaagagttatatattatgatatatttttatcaacaaaaagactaattaataataatgtttttataatattgcaggaagcaagtacgaggcttcacgaagtatttttgtaccagtttcttgtggggtttatttaagtggttcttctcagggatagaggactgtggattcgaacagttcccttccttcggattgcaagcttggaagcaaacgtatgattttgagcatattaattaattgcttncaggaatggagccttccatccaaactattactgatcttagtttttgaatttactttgcagattctacttcgattttagtatgacttttgtgggagcagggatgatttgctcccatcttgtgaactgttctttgctccttggagctgtgctctcttttggggtcatgtatccgctcattgatcggcttaaaggagactggttccctgacaatttagaagaaactaacatgaagggcttatacgggtacaaaggtttttgtttccattgctcttatcctgggtgatggcatatacaatttcaccaagattctaatttctacagtccctcaatggttatgaaagaatgaggagcaagaataataaaaatggtaagagcagtcacatccaaacactcaagtttgcttcttttttatttttcaataataaaaatatatatctaatgttgaggtcgttttcttactgcaacagtagctgctgatcggcacgagaatcctaccgaggaccttaaacaaactgatgaatttctaagggagaccattcccctgcggattggagtcattggatacgttgttttcacaatgatttccataattataattccacgcatgtttcctcagctgaaatggtactacgtggtggtagcttatatatttgctccatctctggcattctgcaatgctttcggagcaggtctcactgacataaacatggcatataattatgggaaggttgcactctttacgctggcagctgttacaggaaaagaaaatggtgtggtggctggacgtgtgggttgtggtctcattaaatccgtgatctcagtgtcttgcattctgatgcaagatttcaaaactgcacattacacacgtacctctcccagagcaatgttcatatgccaagtaattggcattgcaatgggttgtgtgacagctcctctcagcttcttcctatactacaaggcatttgatgtgggaaacccgcatggagaattcaaagctccatatgcgttaatttatagaaacatggcaatcatcggggtccaaggtttctcagcattgccacagcattgtttgcagctatgctttgggttctttgcttttgccataggagtaaacatgataagagattttgcaccccaaaagattgggaaatggatgccattaccaatggtcatggccgtaccgtttctggttggagcatactttgcaatcgatatgttcataggtactgtggttgtgtttgcttggcagaagcttgactccaagaaggcagagttgatggttccagcagctgcctctggactaatttgtggggaaggactatggactctaccagctgcgattctagctcttgcaagaattaaacctcctatctgcatgaaattcgttcctacctagagcttcacccacaatagagcaaacaattctataggaattattagttagtgcacccttcccacccacattggagcacatcaaacattatccaaatgctttacagaactgcccctgccaccccatcctatttgcaccatacnttanttnaattgtttnnggtccctccaccnaaaaaaaaaaaaaaatttngnggggancnattttaaatncccccccccccccccccccc

SEQ ID NO: 8420 - DNA, 1270 bp, Glycine max
ctttattgacatctcggcatctctctcaaagacgaataaggcttcctgtcaggaaatatcattctaagaatgatggtccaaaggttgcattcttcagtgatgatgaggctcgagctccaacaacacccaaggctgatgctctgttcattcctagggaaaatccaagggcgttgataatttgtcccgtggagcagtggccaggaaaggcttctgagaaggcatcaacatttaaggatagatccatcccagtgaatgagaatgagagtgctgtagaaaatggttttgtcaaggagcaagctcagcctatatcgacaaagccaacatccaatgggagcaatgaagatcattctccacaaaaggcggacgtgtacaagacactcagaggtcacagagctggtgaggctgccattgtatatgaacatggagctgacgttgaggcactaatgccaaaactgcggcgatctgattactacacactgcctcggatacatgaactggcagccaaagaaagagctgaacctggattctgcagtcatgttaaggacttcgtggttggaaggcaaggttatggcagcatcagattcttgggtgagacggacatacgagggctcgatctcgagtccctcattcagtttaacaaccgggaggtgattgtatacatggatgattcaaagaaaccccctgtgggacaagggctgaataagcctgctgaggttacactactcaacataaaatgtttcgacaaaaaaactggacatcagtatacagaagggccaaagatcgagaaatacaaggagatgctcaagagaaagactgaggaccaaggtgctgaatttgtatcatatgatcccactaaaggagagtggaagatcagggtcagccatttcagcatctacaagctggtagaagatgaaaacagtcggataaatgatgacaactaagggttggtccgtttgattcgatacggtggatgaccacagtagatttgatagtttcagaaccaatgttctgctttaaagtttattttgtttttttccctgtaaattgtcactgtattgtgtggatatagcttgggccaatgttgttgatgtgcttatcttgctttggggatatttacggttggggatgttcaaatatgggtttcctaggatcattttttacgtaaattttgattcgcatagctgttatggttattttcaacttttatttttgtgaattatgatgttttgtatgacactttttatttcaataagttgatttagagttcagt

SEQ ID NO: 8421 - DNA, 835 bp, Glycine max
cgattcgggtgtgcataagggggcgttggggcttatgctgaactctgtcgttttggcattgatgtcgttgacggtggaaccgttgggtcgtttcgttgggggagttaagtggctatggggaatcgttaacgtaattctcgccgtttgcatggcaatgacggtggttatcacaagggctgcagaacatgaacggaaaaacggcgtttctgctgttgggcatccctcagttggtgtgcaagtggctgcattgactttcttctccgcccttggtgttcctcttgctattactttcagcgtcccctttgcactggcatctatatactcctccacttcaggagcaggccaaggtttatccttgggcgtcctcaatgttgcaattgtcgtgccacagatgatagtatcggctataagtggacagtgggataagtggtttggtggtggcaacttgccggcgtttgtgttgggtgccgtggcggctgccgtgagtgccgtgttagcggttgttctgctgccaacaccaaagccagcagatgtggccaaggttacttccgtcactgctgggagtttccattagtatatattatagagttttacatgcatgggacaatattagatggagacttttaatttaaatttggtgagtgtgtattatttaggtattagacccatcaaataactctttagggtgggcttaagttttatccttgttttctctaataaatatatgtacaacaacattaaaaaattataaatccatcaaatgcttcgtattgccattttggcaaccccaaaaaaaaaaaaaaaaaaaaaaaaaaaaagcggccgctctagagga

SEQ ID NO: 8422 - DNA, 1810 bp, Glycine max
ctcgagccgaaccgagtgacagtgtgattgagtttggctgtcataatctctctctcatccgaaaatgtcactcaccttgcaaactccgccttctacaactctctcttctgcatctcccattcacagaacaataacaagatacaccacattctccttctcgcttcgtcctccaacaactcttcacttcaatccccacaggtccctccctctaattcgcgcttccaattcttctatcaatgccgcttcgaccactgaactggacgctgtgtccgccttcagcgagatcgttcccgacaccgtcgttttcgatgatttcgaaaagtttcctccaactgctgctactgttagttcatcgcttctcttgggaatatgtggccttccagacaccatttttaggaatgctgtggaaatggctttagctgattctgagtgttatggacttgaaaatcctaacgcgcgattgtcttgttttgtcaacaaggctttcgcgaatatcggtagtgacatggcaaagcttgtccctggccgtgtttcgacagaagtggatgcgcggcttgcttatgacacacatgccattatcaggaaggtgcatgacctgttgaagttgtacaatgatagcaatgtacctccgcaacgtctgttgtttaaaattccttccacttggcaaggaatagaggctgcaaggttgctggaatccgaaggcatacagacacatttgacctttgtctacagttttgctcaagctgcagctgcagctcaagctggtgcttctgtcattcaaatttttgttggtcgcataagggattgggcacgtaatcattctggtgacacagagatagaatctgctcagctaagaggagaggatccagggttggcattggtgacaaaagcttacaattatattcacaaatatggacataagtcaaagttgatggcagcagcagttcgcaacaaacaggacctatttagtcttctgggggttgactatatcatagctcctttaaaggtattgcagtctctcaaagaatctgttgcttctcctgatgagaagtactcttttgttaggaggttatcccctcagtctgctgccaagtacacatttagtgatgaagagcttgttagatgggacgaagatagcctctcaaaggccatggggcctgcagctgtgcagcttctggctgctggactggatggccatgctgatcaagcaaagcgggtggaagagttatttgggaaaatttggccaccaccaaatgtatgattcgacgacttctttatgtcgcacgagagtcttttgcctgatggatcaataaacataatacacgactgatgaagggaatatttcgttggttttctttccctcttacccatgaagtcttgaacaatttccttaatgtgaagcacgcggttcctaaatgcacattttgttatttttctctttcgtttgtgccagttgcatttgtctaattgactgtctatctatggttattctctaagtaaggtcggatactcgtacaaactaaggccgtaggtagggtcggtcaaaacccggcctttcaagtgttacttattgaccaggcctggcacgcagttaattgggtcacacttgggctggctttgtcgaagcacataaaatgattggcaattgcttcctgcacctccattttgcttcctgtgcctaatctctggaaatgtaaaatcaaacataaaaataattctaggtagtaaaataaaaagggagaagtttaggtagcaaaatccaaatagacattattacatgtatgaaaaatatatttcaattttttttttt

SEQ ID NO: 8423 - DNA, 1594 bp, Glycine max
aatcccagtctagttggtaggtgtatacctaaaacgattcggctcttcccaacgacaaatcgtgattcgaagctaactggaagggtggccatctggcacatcatccgaaacaaaaggagtggagaacgaaataaccaaaaaaatacaaatatataaataattaaagcagcctcgacccacaaaatggcagagcgtgtgttactcctcactccatctcagtctcatcactctccaaccacaatggctgtcttgggcggcgccgcctccgctcgcatcattccctccgtctcactctccacctcttctcgctccttcttctccttatcatcctcttccaaactcaaatgcttgcgctcctctcctcgcatttcgcacctctttctcaatcagcaaagagcggaggttcgcgtttcgagtggaggatacggaacggtatcggcgccgaagtccgttgcgtctgatcctgatcagttgaagagcgctagagaagacatcaaggagcttctcaactccaagttctgccatcctattctcattcgtttgggatggcatgatgctggtacatataataagaatattgaggagtggccactgagaggtggagctaatggtagcttaagatttgaagttgagctgaaacatggagccaatgctggacttttaaatgcattgaaacttcttcagccgatcaaagacaaatattctggtgtgacatatgcagacttatttcagttggctagtgctacggctgtggaggaagctggaggccccaaaatccctatgaaatatggaagagtggatgtatctggacctgaacaatgccctgaagaagggagacttcctgatgctgggcccccttcacctgctgatcatttgcgtcaagttttctaccgtatgggtttgaatgacaaggaaattgttgcattatctggtgcacacacactggggcggtctagaccagatcgcagtggttggggaaagcctgaaactaaatatacgaaagatgggccaggagcacccggaggacaatcctggacagtgcaatggttgaaatttgacaactcctacttcaaggacatcaaagaaaaaagggatgaagatctattggtattgccaactgatgctgctctttttgaagacccatcctttaaggtatatgctgagaaatatgctgaagatcaggaagcattctttaaagattatgctgaagcccatgctaaacttagcaacctaggagccaaatttgatcctctagagggcattgtgatagatgattctccaaatgcagggggagagaagtttgtagcagccaagtactccactggaaagagtgagctgtctgactctatgaagcagaagatacgggctgaatatgaagcaattggtggaagcccagataagcctctacagtcaaactattttctaaatatcatgattgttattgctgttttggcatttttgacatcactgcttggaaactagttggattttgttcttctgatatttgctataattgcattggcatttgcacagttctaatttttaaaaaaaaaaaaaaaaaattcttcattgagcccaaataaaaaaaaaaaaa

SEQ ID NO: 8424 - DNA, 844 bp, Glycine max
aagttttctaccgtatgggtttgaatgacaaggaaattgttgcattatctggtgcacacacactggggcggtctagaccagatcgcagtggttggggaaagcctgaaactaaatatacgaaagatgggccaggagcacccggaggacaatcctggacagtgcaatggttgaaatttgacaactcctacttcaaggacatcaaagaaaaaagggatgaagatctattggtattgccaactgatgctgctctttttgaagacccatcctttaaggtatatgctgagaaatatgctgaagatcaggaagcattctttaaagattatgctgaagcccatgctaaacttagcaacctaggagccaaatttgatcctctagagggcattgtgatagatgattctccaaatgcagggggagagaagtttgtagcagccaagtactccactggaaaggaatagaaacaagtgtcatgttttcttgtgccagtatcttttagtaatacaagaagacgctattttcaaatcatgtgatatcgcatgtaaaatttcgaagttttaaatgaagaagaaaggaataaaattcaatagtgtgcctatttgaattgcagagtgagctgtctgactctatgaagcagaagatacgggctgaatatgaagcaattggtggaagcccagataagcctctacagtcaaactattttctaaatatcatgattgttattgctgttttggcatttttgacatcactgcttggaaactagttggattttgttcttctgatatttgctataattgcattggcatttgcacagttctaatttttaaaaaaaaaaactcgagactagttc

SEQ ID NO: 8425 - DNA, 1184 bp, Glycine max
aaaattcttgaagctcggcaaccttattaggacctcaacttctacattaatctttccatcagacatcagtttctatgattttctgcactcttgtattctgagctgaacaaattctgttcttctctcgtatagtgaagtaaacaataagcacataaaccttcgtggacatggcaacaacagccttgtccacgaccagtgtgctttgcaggaggaaacctcagcacatgcatattatcctaccctcttcacagacactccaaaatggaactctaagaactgatgtaactgcttcagcctcaaaagataatatcagcatagaaagtgagaagtgttgttcctctttgttggtgaacagaagaacagttttggcttctggggtttccttgttgggtttcccgggtgagagtttggctgtggtgaaacaaggccttctagctgggagaattcctggcctgtccgagccagatgaacaagggttggaggacgtatcgcaggccggatgagaagtctggaggacatggtgttggatggagtcctattattccatacagcttcagagtgcctgaagaatgggaagaggtaccagtatcaatagcagatcttggtggcacagagatagatttgagatttgccagctctaaggaaggacgtttgtttgtcattgttgctcctgttcttagattctccgatgatcttggtgacaatgctacaatagaaaaaattggacctccagagaaagtgatcaatgcatttggtccagaaatgattggggaaaatgtagaagggaaggttctgagcgttagtgcagcagaacatgaaggaagaacttactaccagtttgagctagagcctccccatattttcattactgccactgcagctggcaaccgcttatatttgtttggagtaacaggcagcggtcttcagtggaagagacactacaatgatttgaagaagatagctgaatctttccgggttgtataactaaaatcttctgtgaacccagagctaattgaaatgcagctttctatatttgtagtgcagtacaacaaagaggttgtttccctctactttgtctgactgggatttatgtgaatcaagagatcatataggcaaaatctttgtaccttcaatataccaaaccagtcgtgttatatttcaaagttgctgttctacgttctaag

SEQ ID NO: 8426 - DNA, 1813 bp, Glycine max
cccacgcgtccgcccacgcgtccgtactccgtcgcgtagacgacagccccccaaccacacatttttcattaccgccgtgataacacactaacaccaccacttcatcaactttacttgacaacaatattgtaaaactcaaaatctagtttcatactttttttcttcttcttgaaatggctctccaggctgcttctcttgttcctgcttctttctcggttcttaaagagggaaagagtggtgtgtctctcaaggactccaccttgttcggtctttcattttcagaacctatcaaagctaacttcagctcttctgcattgaggtgcaagagggaattcgaacaaaagctctgtgctgtgagggccgaaacagtggctacagcctctccagcagttaccaagtctacaccagaagggaagaaaacattgaggaagggcagtgttgtgataactggggcttcatctggactaggcctggccactgctaaggctttggctgagacgggaaaatggcatgtaataatggcctgcagggattacctcaaagctgcaagagctgcaaaatccgctggcatggctaaggaaaactacaccatcatgcacttggaccttgcctcgctcgacagtgtccgccaatttgttgataacttcagaagatcggaaatgccgttagatgtgctggtttgcaatgctgctgtttacttgccaactgctaaggaacctaccttcactgctgagggctttgaacttagtgttgggacaaatcatctggggcatttcctcctctcgcgcctgttgcttgaggacttggaaaaatccgattacccttcaaagcgcttgatcatcgttggttcaataacagggaacacaaacacattggctggtaatgtacctcccaaggctaaccttggtgacttgaggggacttcagggtggtttgaatgggctaaacagctcagccatgattgatggtggagacttcgatggtgccaaggcgtacaaggacagcaaagtctgcaatatgctcacaatgcaagaattccacagacgattccatgaggaaactggaatcacatttgcttccctttaccccggttgcattgccacaacaggcctgttcagagagcacattcccttgttcagaactctgttccctccattccagaagtacataaccaaaggctatgtctcagaagatgaagcaggaaagagacttgctcaggttgtaagtgatccaagcctaacaaaatctggtgtttactggagctggaacaaagcatcagcttcgtttgaaaaccagttgtctcaggaggccagtgatacagagaaggctcgtaagatctgggagattagtgagaaacttgttggttttgcctaagtgggaggagcctccaacatcccatgttgttctagagaccttgcacttgcatggaggaagaaaatgatgtctcaaaagagtggatagataacatcctatcattttgaatgcattgatgttgttttgttagctaggagcttctttgctttgatgtaaggtgtcaatggctttttgtgaatcaagactcaataaaatcattcagccatgtgggtgtggtgaagttgctcataaactttctgaaacaacagtgcctagtaaactataaattgtagtgtggggctcttttttagtttttcgttaatagtcgtttttaagtgaacttcagatcaaatggttgaaccaaagatcttgcttcataaaagagcaattgcacatgcaatatgcagggagaaaaaaaaaaaaaaaaaaaaaaaaaaaaaaaaaaaaaaaaaaaaaaaaaa

SEQ ID NO: 8427 - DNA, 1339 bp, Glycine max
tcagctacgtaggcccccccccccgtgcactattacttgtgttatatgtttttttttatagtgttgatcatgttttgtatggcagtcacatatcttcttgctgaactgtgatgtatgctgcagttttccactgccagaaatgctggatgcccataaaagatatggtgggatgggaacaatactagttgtcaaggtttctgcagagtcagcaagtgagttcggggaattagtagctgatccaaccactaatgaactattgcattacacagagaaaccccgaaacttttgtaagtgatcgtataaactgtggtgtgtacgtatttacacctgatatctttacagccattgagggtgtttctactcagcggaaagacagagctaacctaagacgtgtctcaagctttgaagcaatgcagccagacacaaggagtcttccagtcaattatgtcagattggatcaagatatcctctcacctcttgcggggaagaagcaattgtacatttatgaaaccaatgacttttgggaacaaatcaaaactccaggaatgtccataaaatgttctggcttgtatcttgcccaatttcgttacacatccccccatttattagcaaatggagatggtattaaaaaagccagcatcaccggtgatgtttacattcacccatcagcaaaagtgcatccatctgctaagattggtccaagtgtatcaatatctgcaaatgctcgtataggagctggtacaaggctcaaacattgtatcatccttgatgacgttgaaatcaaggaaaatgctcttgttggtcatgcaattgttggatggaaatcatctattggtcgatgggcatgtgttgaggctagtggagattacaatgcaaagctcggggtaacaatacttggtacctttcttaaccttgtctacattttgtctcttattatttatttctattttgtatttttatggagaagtatgaaaaggcaaagttaaattaccaactatgcaattcttgttcccttgctgagaccaggtgaatctgtgaccgttgaggatgaggtagtggttttgaatagcattgttctgccacataagaccctaaatttgggtgttcaagatgagattcttttatagaacctccaaagctcccattgttgcctttatattttccttgtgattgtatttgcagcgacttttgtttaatttagtatctagtttggaaacccaaaaacagtgggtataatcgattttgtcccaaaattgactgtttttggagcaaaatattcattgtagtacacacatcaatgttgctattttaataaagaaatgaaagtatatcctctcct

SEQ ID NO: 8428 - DNA, 1259 bp, Glycine max
aaaatatcaaaatcccctctaaacctctatgttctctatttctctctcacgcagccattcccatttcccactcgcccaaaacctcagcaaccaaacaaacgccgccgccgtcgccatggccgcgatcgcgcgactgaggactgccgctctcgggctccggcccaaccgcgggttcggatcggcggctgcggtccagtgctactacgacgacgacgactacgacgacgaggaggagatggaagaggagcgcgcgccacgtggcgcactggacgcgcagggttgcgcgccggagaacggagtgcagtgggtgatgataggggagcccggcgccaagaggcaccagttcgctcagagactctcgaagcttctagaagtcccgcacatttccatggccacgctcctcagccaggacctcaaccctcgctcctctctctaccagcagatatcacataccctggatcatggaaaacttgtccctgaggatattatttttggtctactatcgaagagattggaggatggatactcgagaggcgaaactgggttcattcttgatggattcccacgaacaaggatccaagctgagattcttgatcacattgctcgtgttgatctggtggtgaatttcaaatgttcagaagaggagttaaggaaaaagaatctaggaactcgaaaatttaatgcttaccaagaatatattcttatgaccagctccaggacaacaaaacaattgcaggatgatcatgaccaaagtcatgcagacaagtgcaagctcttggaagattactacaggaagcagaagaaacttcttaactttgaagtagcaggtgggcatggagaaacctggaagggacttcttgcagcactacatcttcggcatattaatgctcttaggtcttcacagaagttaactgcgtgaagaatggcaaccgatcttctatggcatcaatccattgtcggcattctagtatatttgaatacgagaggctacaatttcctagaaattgtgtcggtgtctaaatcggtgattgtttttcaaaattttgagaatgcttagttttttctgtagtgcaaccgtccaagtttgaatgaatcaatacgtattgtgtggtcctaaatcctgatagtcagtacgtgttgtctttttttgttcaatggctcctatgtaatctctttttctagttaatttttcctggtccccagtcccagaatcactttatcatgtgatgttgtaaaatataacaaataaaaaaaaaaaa

SEQ ID NO: 8429 - DNA, 1434 bp, Glycine max
tcagctacgtaggcccccccccccggcagatattaatccatgtttctagttttctacgtaggcatagcataacgtgtgaatacaaacaattgacttactagataaaacttccatatatactaacaacattcaacacgtatcagcagacccaaaagaagatatggaagcaaagaaaatcccagaagtgatactaaactcagggaaaaagatgccagtgataggcctaggaaccgcatcaattcctcttccatcacatgaagctctcacctccatccttattgatgcctttgaggttggctacagacactttgatactgcttctctgtatgaaagtgaggagtctctaggcaaagctgtggcaaaggccttagagctaggcctcataaatagcagagaggaattattcatcacatcaaaactatggtccactgatgctcatcctgaccttgttgttccagctcttaagacctccctgcagaagttgggattggagtatgtagatctctatttgattcattggccagtgaggctgaaacctgaagccaaagggtaccataatatattaaaggagaatgtgcttccctcctttgacatgaaaggaatatgggaggctatggaagagtgttacagattgggcttagccaagtctattggtgttagcaacttcggcatcaaaaagctaagccagctcctggaaaatgcaaccatccctcctgctgtcaatcaggtggaaatgagcccagcatggcagcaggggaaactcaaagaattctgcaagcagaaaggaattcatgtgagtgcatggtcaccactaggagcttacaaaagtgctcaaggtacaaatgcagttatggagagcccaatccttaaggaaattgcttgtgaacgacagaagagcatggctcagattgcactaagatggatatatgagcaaggggcaattgcaattgtgaaaagcttcaacaaggagaggatgaaacaaaaccttgacatatttgactgggaactgagccaagaggaatcacagaaattcagccagattccgcagcgtaggatgtatcgcggaataacttttgtatcagaaaatgggccttacaagaccttggaagagctttgggattgagattcctgaaatcattcctaatagcagcaaaatgtcatataaggctgtgtttggtttaagatgggaggagggaactaggagagaaattttgtacttttcatgtggaactcacatcttttacactttaataaaacaaaaaaaatcttctatttctatcctctaaaccaaacacaccctaaatgtgtatctctatatttacgtatgcaacccatggcatggattcatcaatgttgccgggccatttaaaggaataagatggatagaaaaagaattcctggcattttaataaaaactcactttatattcaaaaa

SEQ ID NO: 8430 - DNA, 1814 bp, Glycine max
ctttgatttcggttccgaagggacaaccaacgaccaccctctcttctgactcacttctcgaaccttccaaacatggaacgcatcgttggcggcaagtacaagctcggccgcaagatcggaagtggatccttcggcgaaatctacctcgcgacgcatattaataccttcgagatcgtcgccgtcaagatcgagaatagtaaaacaaaacatccacaactgctttacgaggcaaagctatacaatattcttcaaggaggaagtggcattccgaacataaaatggtctggcatagacggggaggataatgtgcttgttattgatttgcttgggccgagtcttgaggatctctttgtgtattgtggaaggaagttttcattgaagacagtattaatgttggctgatcaaatgatcactagaatagaatatgtgcattctaaaggatttttacacagggatattaaacctgataactttctcatgggacttggtcgaaaggccaaccaggtttacataattgattttgggcttgcaaaacgatatcgggattccactaccaatcgccacatcccttacagggagaacaaaaacttaacgggtactgctcgatatgcaagttgcaatactctccgcggcgttggcccccccccccgggatgatttggaatcactaggatatgtacttctgtacttcctaagaggaagccttccttggcaaggtctaaaggcggctacaaagaaacagaagtatgataaaatatgccagaagaaattatcaactcctattgaggtactatgcaaatctcatcctgtagagtttgcttcgtacttccattactgccactctttgacatttgatcaacgacctgattatggtttcttgaagcgcctatttcgggacctatttgctcgtgatggttatgattttgattacgtttttgattggaccattttgaagtaccagcaatctcaaaagaatgtaatgctccctccattatctccagttccaggagcaagtaacagtcgtgcaattccaatggatattgacaatcatcaaggtcttaattcatattcagggcatgttaaagagcgtattagagctggtgatgctactggttctggtgttaaaattcagtttaaatcaccagtgggtaaaaatttgagttatgagaaaccacttgacaaaaatatttttggagaagcaaatattccctctacttcattttctcctgctagtacttcacaaaggaactccttgaagcaatccttgtctgctgaagcttccaaccctggacatgcacaaggcagtaaaattggcccttcaagtagcttgatgtcatctctgcagcacatgtcttctgctaaatgattgcaaaatatgctatgaagctttgaagaagattctgtgcattgtttcccctattatttggtcaagaatattcaagtcattattaattcatggagactgcaaatgtgccagaaagttgacaaattgcatagctcctattttgaggccatttagtgttgcttctttcctgaggtgactacaaatgcttgtgcggtataaaacagacttcccaggcttggctcctgtgctgtacatagatgtcaaatttggcacacagcaatattttgtattcatgttttcatgtaacattaatgtgtgtagtagccctgttactccgatatgttacttgatgatgattatcattgtgccatacaataaatggtgacagagtgttttaaaacttctaaattatttgtcaatattataaattgcaaaggtattttcaggttcttttgaaaagaaaaaaagag

SEQ ID NO: 8431 - DNA, 1848 bp, Glycine max
tcgagtcagctacgtaggccccccccccggcggtgctgtgtctgtgtggctttgatttcgcttccgaagcgacaagcagcacccactctctcttctcggaccttccaaacatggaacgcatcgttggcggcaagtacaagctcgggcgcaagatcggaagtggatccttcggcgaaatctacctcgcgacgcatattgataccttcgagatcgtcgccgtcaagatcgagaatagtaaaacaaaacatccccaactgctttacgaggcaaagctctacaatattcttcaaggaggaagtggcattcctaacataaaatggtccggcatagatggggaggataatgtgcttgttattgacttgcttgggccgagtcttgaggatctctttgtgtattgtggaaggaagttttcattgaagactgtattattgttggctgatcaaatgatcactagaatagaatatgtgcattctaaaggatttttacacagggatattaaaccggataactttctcatgggacttggtcgaaaggccaaccaggtttacataattgattttgggcttgcaaaacgatatcgggattccactactaatcgccacatcccttacagggagaacaaaaacttaacaggtactgctcgatatgcaagttgtaatactcatcttgggattgagcaaagtcgacgggatgatttggaatcactaggatatgtacttctgtacttcctaagaggaagccttccttggcaaggtctaaaggctgctacaaagaaacaaaagtatgataaaatatgccagaagaaattatcaactcctattgaggtactatgcaaatctcatcctgtagagtttgcctcgtacttccattactgccactctttgacatttgatcagcgacctgattatggattcttgaagcgcctatttcgggacctatttgctcgagaaggttatgattttgattatgtatttgattggaccattttgaagtaccagcaatctcaaaagaatgtaatgctccctccattatctccagttccaggagcaagtaacagtcgtgcaactccaatcgatgttgacagccatcaaggtcttaatgcatattcagggcatgttaaagagcgtattagagctggtgatgctactggttctggtgttaaaattcagtttaaatcaccagtgggtaaaaatttgagttatgagaatccacttgacaaaaatatttttggagaagcaaatataccctctacttcattttctcctgctagtacttcaaaaaggaactccttaaagcaatccttgtctgctgaagcttccaaccctggacatgcacaaggcagtaaaatgggcccttcaagtagctggatgtcatctctgcagcgcatgtcttctgctaaatgattgccaaatatgctatgaagctttgaagaagattctgtgcatcttttcccaaagtgtttggtcaagaatattcaagtcatttattcatggagactgcaaatgtgctagaaaattaacagattgcatagctcctattttgaggccatttagtgttgcttctttcctgaggtgactacaaatgattgtgcggtataaaacagacttcccaagcttggctcctgttctgtacatagatgtcaaatttggcacacagcaatattttgtattcatgttttcatgtaacattaatgtgtgaagtagccttgttactccgatatgttacctgatgataattatcattgtgccatacaataagtggcgacagagtttgttttaaaacttctaaattattttgtcaatattataaagcgcaaatgtattttcagtttcttttatttggatcaaa

SEQ ID NO: 8432 - DNA, 2145 bp, Glycine max
ggctcgaggggaaacaacctagaaccgggtccggttgggccgttggccggggttggagtgagacaaaattgaaaggacaaaaataccccccggatgcatatttgtgttgttctgttctaagcgagtggttttggtttcggtggtgttgctctgagatcgctgcgtattgttattattatagcaggcacctaatagatagatagatagatacgtagggatagggttaaggccatggagcgcatcatctgcgccaagtacaagctaggtcgcaagatcggaagcggatccttcggcgaaatctacctcgcgacgaatattgataccttcgagatcgtcgccgtcaagatcgagaacggtaaaacgaagcatccacaattgctttacgaggccaagctctacaatattcttcaaggaggaagtggcatcccgaacataaaatggtgcggcgtagacggggaggataatgtgcttgttatggacttgctgggacctagtcttgaggatctttttgtctactgtggaagaaagttctccctcaaatctgtgttaatgttggccgatcaaatgatgactagaatagaatatgtgcattctaaaggattcctacacagggatataaaacctgacaactttctcatgggacttggtcggaaggcaaaccaggtttatataattgattttgggcttgcaaaacgatatagggactcctcaactaatcgccacatcccttacagggagaacaaaaacttaacagggactgcacgctatgctagttgcaatactcatcttgggattgagcaaagtcgacgggatgatttggagtcacttgggtatgtgcttttgtacttccttagaggaagccttccttggcaaaacctaaaggctgcaacaaagaagcaaaagtatgataaaatatgtgagaagaaagtatcaactcctattgaggtattatgcaaatctcatcctgtagagtttgcttcatactttcattactgtcactctctgacctttgatcagagaccggattatggattcttgaagcgcctatttcgggacctatttgctcgagaaggttatgaatttgattatgtatttgattggactattttaaagtaccagcaggcacaaaagaatagagtccagtctcgtatatctacagtccctggaacaagcagtagtcctgcaatgccaatggatgtagacaaccatcgaggtattaatgcttattcaggggatgtcacagcagaacgcattaagtcgggcgcgggggcgggcgcgggggttaaaattcagtttaaatcaccagttggcaaaaatttgggctctgaaaagcctctggacaagaatatttttggtgaagcgaatataccctctacctcatactctgttgctggtacctcaagaaggaacaccttgaagcctgccttgtccactgaagctcctaaccctgggcatgggcaaggtagtaataaaattggcccttcgagtagctggatttcatctgtgcagcgcatatcttctgccaaatgaatgcccaatatggtttgattctgatcaagaagattccttgtatacattcattaacctgcaaatttgtggtatttgcttgcttcaactgtacatttttggtcaagaattttcaagtgatctatccagggagactgcaaatggctgcaaggtagctcgaatttgactatcagccagattaacttgtattgtcattcttgggatgaatgaaaacctggtcttatttcagtgtagttcaaggacttcttttttcaacctatattgtctgaaggatgaaatatgactgacagttggtatatatggatgctattatcaactggaacatacctctccatacagattgggttgtcatagcattctgggagtcttcagctttgtgacaaagcttgaaatgagaattgcttttgatatggatgttagttagcaaagatgattcaagatctgtgattctaaccaacatttgcgtgaagttgactattcatttttcagttgatggacttgatcagtgatcattgattttgttgctggttacaagtgggtctctcgaggaaaattatagttgaaaacaatgcatatgaaggaagctcactttcatatattgagaaacatttggtttaa

SEQ ID NO: 8433 - DNA, 995 bp, Glycine max
tcgagtcagctacgtaggccccccccccggtctcaaagattctctagaagccttttcttcttcgatctctttgatctaattcattgcaagagaggaaaatatgaagcaggattcgtttcaggcaccaaattgccgagatttccgacatgtatcttcaaccgccaagctcaaacgccaagacgcaccaaattggaaagcttcccggccactcgtcaatagcatttctcctatgtcagtggtgctcttcattatcagagctctatcatttgtctgtgaggtgctacttttgctgcttgcagtcgcaactcgtcttgtcaagatcatcggtgttgctctaacagcttatggaggatcaggtaataagaaagtcaacagcagcaagcagggaagagatcatctgagccataaagaaggcactaccaacatacacaacatgcacaaaggggatcaaagcttacccaacacctctgctgttacaaccaacacttctgacgaccaaattcttcgttctgctggaactgaaaagcactctagtagcgttaacaatggtactgaggatgcctttataaactcaggaggcggacatcaatacttcaaggaggcggagttcaacactggtgtgcaagttgccaaggggagacacgctccttgcagtggtaacaatgggactaaaagttcttttcgcaactctggttcgggaaaacaggatttcggaaatgctaagtttaacactggtgctaattacaactaatttatataagaccttcctcttggaggggctgggcttccaaaacatacataataatcataggtatggggaataaaaaacactagtgctcatttgtgactcatgcgtaagatgtgtgtatgtatgttgttatatgctaataattatatatgatactggagctagagctctgtgtactgtaactgtaatggcgatgtaatccatttcaattatatatgcttttataatcaaaaaaaaaaaaaaaaaa

SEQ ID NO: 8434 - DNA, 1502 bp, Glycine max
cggtcggaatcttgtacctatttttcgcctatcatcattgaatttgaatcgaagcacaccacccacgcatacgttcgttgattcatgttctgttctgttccttttctaaacccaacacaacatcgtgtccttttcttctcttcgatccactacgtgcctgttcctctgcttcaggcacatactcctgcaggttaaatggcaaggatcaaacctcaggctctgctacagcaaagcaaaaggaagaagggtccttctcggataagcgccgcgactgttatattttatttcttgattcttgccttgcttgggtttttcctgtttgcttcgtacagacattggtccagcaggtcaagattgcaatcagaagatcacttgtcagtctccgagggtgaaaatacttttgtggactccaagaaatctgagctgcctggatatgctgttttaaatacctctaaaggttctataataatagaactgtacaaggaaagtgctcctgaagttgttgatgaattcattgacttatgtcaaaaagggcacttcaaggggatgctttttcacaaagtaattaagcactacgtgattcaggctggggataaccaaggacaaggagctactgaagactggaacttgagaggaaagcaacatacaattactaggttttcttattcttctggtttctgcaatttaagtttctgatatattcatacatagtgacagtaatgatctactagttgcatagttttctaattgatggacattgtgattattaactagtatgaaacatgaagcattcatgcttggaacttccaagggcaaacaccacaacaagggatttgatcttttcattacaactgcaccaataccagatctaaatgagaaaattattgtgtttgggcaagtcatcaagggagaggatgttgtccaggaaattgaagaagtggatacagatgaacattacaagcctaaagtatctatcgggatacttgatgtgactcttaaacaaaaggtctgaaggttctctgctagatcaagatcataattagctgtgatacttagtcataacctgttttcggggacactggtcaagtctttttgtatagggatgaaccttgagaattttgcctggggtgcatctatcaagtgtttgagccttgatgttgtttttgctattgcatttttagttaacacagggattatgcaatctcctttccttacatcctgtcattttatctgtttgtttttctttcttttctttgaaaaaattggggggcgggttaggtttgttggaagggttttgcattttgcttgtaaggtttggtaatatcacatttttttttggcattacttttcatttgtaacctcaatgagatcacaggatcacttccttatgcagttcatgacttaatgtatcatttgtgtttccattgatggccaatttggcggtgagtcagaatggtaaagctttgtaagtcatattttcatttggctataaaagtcaacca

SEQ ID NO: 8435 - DNA, 1883 bp, Glycine max
gtgataacaacagtcaagaacatgatgaagcaatagctgatgagacaattctttttgtcagctacgtaggccccccccccatgatacaaggcaaaatagaagaaacaaatggcaaacttgattctcaagtacagaaacaaaatggtgatttcactgggtacagaccagtgacaagtgaacctgtttatgaggcgtcatctgatgaaggttggcaagaagccaattcaaaagggcggtcaggaaatgctgctaaccgcaagtttgggcacaaaaagcgacatcatctatcaaagctcagcattaatggttcaaataattacatttacagggaaggcagttctaggaatgagattacttcgccaccacaaagaggagttccaaaagtcatgttagacatgtcatctccatctagacaatcaaaatctagaaacttaactttgaatgaggattctgttaatcattcaacaaaagcttctgtgtccaaaatttcatctccggcatctctgagttccttggcttcaaagtctatatcttacaaagaagtggctttagcaccaccaggaactgttttaaagccattgttggaaaaggctgacatggaaagggttaatgctggagatgagatatgctgcaatcctgctgtgacatcaataagtgaaggtagttgccaaagttccataactaatacagtttgtcagcatgatgaaacagaggaaactcatgaaaatgaacctcaacaagaaagttctggatcggaacttgagaaggtttctgatcaggcaaaatctacagcagaaacaaatggcagtaagctttcagctgcggccaaacctttcaatccaggaatgttgtccatgtctcaccatttaaattcagcttccttcacaagcatgtatgatacagatgttagtcaaggcatgcacgtggagactgtgcttccccctgctgttgctagggtcccttgtgggcctagatcgcctctgtattatagaaccaactatacttttcgcatgaaacatggttctactaaaggtcaaacctctatcagagaaagaagtggatttgggtctccaagaataatgaatccacatgcgcctgagtttgttcccagaaatgcttctcaaatagaagccaatgatgccaattcaaatgtttccaatgagcataactctttgtctgacataggcatgtcagaagaaaacaagctagatgaaaattttgttgaaatcaatgggagttccaacaaaaacagtatttctgaatctgagaagtccgagatagctaggcagatactgctcagttttctagtgaaatctgtcaaggaaaatattgattctgtggatgagtctaaggatggtgaaggaaaaattgagatcttggaaagttgttctgatgaaatagccaaagacagtgctgtcataaacattatgtatggaaatgaagaaaagaataagacagtgcctcattccagtgatagtgatgagcaagagaaattaggtgttactgaaaaaaagaatggagatggtgaagggtttatagttgtctcgaagaggaggaaaaacaggcagaagatcacaaatggagtcacagaattgtacaaccaacagtccatttgtgcttcagttcgttgaatagagttatgaaataaataacggatattgtctctacatctgagtgtttgtctggccgaagctctggacatcatattgttaatagtttataacttcatggcctagaatttttggtcattcaattcattttgttttttgtcgatataataagtgcattcgggatttgtttattctctattatatagtaagttttgttctgatacttggaaattttgttttatcaataaaaagctgattgacaacttcattttt

SEQ ID NO: 8436 - DNA, 1391 bp, Glycine max
ttggcttcaaagtctatatcctacaaagaagttgctctagcaccaccaggaactgtgttggcccccccccccgaaaaggctgagatggacaaggttaatgctgaagatgagatatgtggcaatatagctgtaacatcaataaatgaaggtacctgccaaagttccataactaatacagtttctcagaatgatgaaacagaggaaactcatgaaattgaacctcaacaagaaagttctggatcggaacttgagaaggtttgtgcttctgatcaggaaaaacctacagaaacaaatggcagtaagctttcggctgctgccaaacctttcaatccaggaatgttgtccatgtctcaccatctaaattcagcttccttcacaagcatgtatgatacagatgttagtcaaggcatgcacgtggagcctgtgcttccccctgctgttgctagggtcccttgtgggcctagatcacctctgtattatagaaccaactatacttttcgcatgaaacatggttctactaaaggtcaaacctctatcaaagaaagaagtggatttgggtctccaagaataatgaatccgcatgcgccagagtttattcccagaagtgcttctcaaatagaagccaaggatgccaattcaaatgtttccaatgagcataaccctttgtctgacgaaggcatgccagaaaaaaacaagctagatgaaaattttgttgaaatcaaggggagctccacaaaaaacagtatttctgaatctgagaagtccgagatagcaaggcagatattgctcagttttctagtgaaatctgtcaaggaaaatattgattatgtggatgagtctaaggatgatgaaggaaaaattgagaacttggaaagttgttctgatgaaattaccaaagaccgtgctgtcataaacattatgtatggaaatgaagaaaagaataagacagtgcctcattccagtgatagcgttgagccagagaaattaggagttactgaaaataagaatggagatggtgaagggtttatagttgtctcaaagaggaggaaaaacaggcagaagatcacaaatggagtcacagaattgtacaaccaacagtccatttgtgcttcagttcgttgaatagagttaggaaataaataaccgatattgtctctccatctgagtgtttgtctagccaaagctctggacaatggacatcatattgttaatagtttataacttcattgcctagaattttggtcattcaaatcattttgttttttgccaatataataagtgcattcgggatttgtttattctctgttatagtaggttttgttctgatacttggaaattttgttttatcaataaaaagctgattggcaactttttaaaaaaaaaaaaaaaaa

SEQ ID NO: 8437 - DNA, 1377 bp, Glycine max
tacggctgcgagaaggccctcgaggcgagaacatctttctccccagctttgcttacagttcctataattttttttctccattagattaccaagctctgcaactttgcttctcaacatggagtatcgtctcctacccatttttactttactcaatattgcactggtggcaacccatgctgctttaccccctgaagtttactggaagtcggtgcttcctactacgccaatgccaaaagccatcactgatatcctttactctgattgggtggaagagaaaagcagctcagtgcatgttggaggtggaggcgtgaacgtgcatacaggaaaaggaggtggcagtggcaccactgtcaacgttggtggaaaaggaggcggaggcgtaaacgtgcatgcaggccacaagggaaagccagtgcatgtttcagttggctcaaagtctccatttgattacgtctacgccgccacggaaactcaattacacgatgaccccaacgtggcactcttcttcttggaaaaggacttgcattctggaacaaagttggacttgcacttcaccaggagtacatctaatcaagccacgttcttgtcacgccaagttgcggattcgatacccttttcatccaacaaggtggactttatattcaacaagttttctgtcaaacccgggtcagaggaggctcagatcatgaagaatactattagtgagtgtgaagagggtggaatcaaaggagaggaaaagtactgtgccacttcgcttgaatccatggttgatttcagcacttccaagcttggaaataatgttgaggttgtgtccacagaagtggacaaggaaacgggattgcagaaatacaccgtagcaccgggagtgaagaagttatcaggggacaaggctgttgtgtgccataagcagaactacccttatgctgttttttactgtcacaaaaccgagaccaccagagcttactctgtgcctttggagggtactaatggggttagggttaaagcggtagcagtgtgccacactgacacatcagaatggaaccctaaacatttggcctttcaggtgctcaaagttaagccaggaactattcctgtctgccacttccttcctgaggatcatgttgtttgggttcccaagtagatttgcattcaagtcctttttccatatatgtccttgaataactagcttcaatagcatcagctacagaactcgatgcatgtatttgctcgtactatatagttctctagatatgtatacttttttgctgtttatttagatgctatgtgtggcttcctatgtataaaccatgatgcattaattatatgcgacttatgtgtttgaatagtaaatcgatatatatagatgtaaaaaaaaaa

SEQ ID NO: 8438 - DNA, 714 bp, Glycine max
tttttttttttttttttttttttttttttttttttttttttttttttttttttttttttttttttttttttttttttttttttttttttttttttttttctcgtttctacccaaagttgaaaataaagcaatgcacttaactatacatcacccaataaattgcaaaaccaagtgctagagttacaaaacaaagcatgacactaatcaaacacttcacttttgctttataaacgacttacatataaagaattccatttagattttacattataggtggagagtgcttacaacacaaaaatcatgtggcaaaaagagaagggttggccgaagcattgcccacttgaacttcaagcagctccaatctccgctccaacacatccagcttctcatttaaagacgccaacttgctcttcgtcgtagcctcgaattggacgaggaagtcgaagaggcgacgaacgttgagagaaatgtgagagatgaattcgcggttctcccaatcggcttgcactgcgattcccacgttcactgcgtttgttatccctcctgcgcgagccatttcttcttcttccacgcgtttccagatccaatgctgatgcactctgcagattagaatgcacagtttacttcccacacctctctttctcttcactgaatatatattttctgagtttaattttgactaatgtaatttacactcttatctgaatagacatc

SEQ ID NO: 8439 - DNA, 913 bp, Glycine max
tccggctgcgagacgacgacagaaggggggaagatttattattgtgattgtgaacaaaaaagtgtagtgggaaatggcaggtgcgggtgcaggaggagggtatggggacgcgaaccagaggatagactacgtgttcaaggtggtgctgataggggactcggcggtggggaagtcgcagatactagctcggtttgcgaggaacgagttcagcttggactccaagtccaccatcggtgttgaatttcagacgaggactttggttatcgatcacaagaccgttaaggctcagatctgggacactgccggccaagaacgatacagagcagttacgagtgcatattacaggggtgctgtgggggcaatgttggtttatgacatcactaaacgccaaacctttgatcacataccacgttggttagaagaactgcgcaaccatgctgacaagaacatagtcatcattcttacaggcaacaaatgtgatcttgagaaccagcgtgacgtacccactgaggatgcaaaagaatttgctgagaaagaagggttgtttttcttagagacctcagcactagaagcaactaatgttgaaacagccttcataactgtcttgacagaaatatacaacattgtcaacaagaagaacctaactgctgatgaaaatcagggaaatgggaactcggcatctttgtctggccagaagattattgttccaggccctgcacaagaaatccctgccaagaggaatatgtgttgtcaatcatcttgactttatttataatttgtttctatttagtgtatttcatggttgtgttcttattaccaaattttaaaggtttggcgcattgctttctgtacatttaaatttaatttgtttgggttgctgagtaacaactaaaatgaaagtagatacaaattg

SEQ ID NO: 8440 - DNA, 1110 bp, Glycine max
gacgcgttgtacggctgagcgttcacgtcagtcactgatttcactcccaaacaaacaaagaagaagttagatttgaaattgaaagagaaacaaacttgggatataagaagaatggctagtggaggaggctatggagacgcgaaccagaaggtagattacgtgttcaaggtggtgctaattggtgattcagccgtggggaagtcgcagatacttgcacgcttcgcgagaaacgagttcagtttggattcaaaggccacaatcggcgtcgagttccaaacgcgcactttggtcattcagcacaagagcgtaaaggctcagatctgggacactgccggccaagaacgatacagagcagttacaagtgcatactacaggggtgctgttggggcaatgttggtttatgacataaccaaacgccaaagctttgatcacatacctcgttggttagaagaattgcgtaaccatgccgataagaatatagtcatcattcttataggaaacaaaagtgatcttgagaaccagcgccaagtacccacagaggatgcaaaagaatttgccgagaaagaaggcttatttttcctagagacctcagcactggaagcaactaatgttgaaacggctttcatgactgttttgacagaaatattcaacattgtcaacaagaagaacctagctgctggtgataatcagggaaatggcaacgcagcatctctgtctggcaagcagataattgttcctggtactgcacaagaaatccccaagaggagcatgtgttgtcagtaatcctgactttatttataatttgtttaaatttactagatttccatggttctgtgttcctatcaccaatttttaatgatttggtgcatttcattttgtatatttttacattatttgaaattattttgcatgagttgctgattaaggaccagcagagggaagtaattacaatttccttggtacaacgtaggagacaaaaacttaagtgtgttgttttagatatttttggtgctattttttaattaaaatttaagttttatctcagtaatcaataaaaaaaaaaaaaaaaataaaaagcggtcgctccacccccccagataaagtaagcga

SEQ ID NO: 8441 - DNA, 1227 bp, Glycine max
aatgagagaactccccccaaatggcaagacattcgcacgcgacactttttaacaaccgcgttcgatgtaataaagctgttcccaaccatcctcctttccctttccgaacacaatcaagcttatcaggagcagcacccaataacgtgccaccacctgtcacccaaacggcacggcactagtcgttttttcactttaacactcctccaaaaatcaaatctaaaccaaaaaccgttggttaattatcacttaaactcaaataatcaaacaaacaaacaagctagatttgaaattgaaagagcaacaacaaatttagaactaagaagaagaagaagaagattgcattggagaacaatggctagtggaagaagctacggagacgcgaaccagaaggtagattacgtgttcaaggtggtgctaattggtgattccgcggtggggaagtcgcagatacttgcacgcttcgcgagaaacgagttcagtttggactcaaaggccacaatcggcgtcgagttccaaacgcgcactttggtcattcagcacaagagcatcaaggctcagatctgggacactgccggccaagaacgatacagagcagttacaagtgcatactacaggggtgctgttggggcaatgttggtttatgacatcactaaacgtcaaagctttgatcacatacctcgttggttagaagaactgcgtaaccatgcggataagaatatagtcatcattcttataggaaacaaaagtgatcttgagaaccagcgtcaagtacccacagaggatgcaaaagaatttgccgagaaagaaggcttatttttcctagagacctcagcactggaagcaactaacgttgaaacagctttcatgactgttttgacagaaatattcaacattatcaacaagaagaacctagctgctagtgataatcagggaaatgacaactcagcatctttgtctggcaagaagattattgttcctggtcctgcacaggaaattcccaagaggagcatgtgttgtcagtaatcccaactttatttataatttataatttgtttaaatttactagattttcatggttctgtgttcctatcaccaatttttaatgatttggtgcatttccttttgtatatttttacattatttaaaattattttgcgtgagttgctgattaaggaccagcagagggaagtaatttcaatttacgttatttaaaaaaaaaaaaaaaaa

SEQ ID NO: 8442 - DNA, 3024 bp, Glycine max
  misc_feature (3018)..(3022): n is a, c, g, or t
cggaatcccgggtcgacccacgcgtccgatcaaatctgatttgttttaccagtctagggttagcgatagctgttgattcgtactactgaacgccgtttattcagaagctatattattattaatattattacttattaatttattacgataatatatatagaaaaaatgaatggaaggtgcttctttggtgccatggtggcttagcctagcaacgcagggaaaacggaagaagaagaagcactttctctatacaacagtgctccttctttcattccttcgaataggactgcatctcttatgcatatctgtctctggattctgctgattggaaaggaatttctttcactctggccgctataacaaactcaaactattctcgcacctctaggagggtgtggggtgacaaagagggggtgatttggctttgtgttttgcgaagatcaaagtcatcagatatatggagattgtgccgtgtttctgtgggcttgtcgcttgattatggctaagggtggctttttgctttgttgccagaagctctttctagtttggcactgaatctcagcaaatttagtgtctttgattaggcttctggaaaattgatgctcgttgtagattataattgatttttgtttttctgccttaaagaaagtttaccgcgcggccggtagctgtctacgtcattgcattgcagcaatgtttcggttttcttgtttccatgctaatgcccaaggcaacaaggcaaagaaaacggttcaacccttcttctgaagcaatggtgaagggtttgcaagatgttacggaaaatcatggctgtaaagattcatctaatcttccatgtgcatattcatccccttcgaaagagcaagcacacaagcaaataaatgtcatggagaatcatagcaattgggattctgttgggcgcagttgtaggtcagaggatctgaatagcaagttttcctttgaaaacgacaacaatgttcaccaaactaggcatattaagaagagccagtctcttcaaagtgggcttgatcaaggcatcagggaagctgatgaagatcttgggttgtcgtgtgatggtgccaaaagccagaatgagtcaacaatttctattagcagaaggtatcatgatgcaaaccccattgatcagtatggaaataatccaaacgttgagtttcaagtcagttcaggtcttgcgaatgatggctcacttttttcaataggagacccaatgccttcagataaagatgcccatgaaatttctgatactccgttatctgttgaatttgctggtgacattcctgaccagacttttgttcctggtagcctatttctaaggaagtcacgttctttacccaatatcagagcttctatactttcttctgaaagagatgcttttaaacatgcattgtcaagatcttccgatgatcttcacgctttacgcatgtggcagaaagaggaattcatcaatgagtttgatgatcaaataagggcagatcaagaaagagagaatgacatgggaaaacctgaagatggtcgtatggacagtttctttgatgatggttttgattcttatctgctttctggttcagcagaaaactgggtaatgccaattacagatgattcaagtgatgtcaaaacccttcaaggagattcttcagttcactgtgcgggtgaatttcctaagaaggattttaagattaagcgcattgaggattgggtaattggtttgcagcattgtgggccacctctagaggaaacaaatgaagatttgcctgaagttattgaacctttagttgatgttaacacagtaaatggcgtgacagctgccagtgtggataataaggtcactccaggaatggaagcagctaaaagatatatttcttctctgggtgctaatgccactgccgctcagctaggaaatcatgggttggttgtgatcccctttttgagtgcatttgtgagtttaaaagtgctcaacttggctggaaatgctattgtgaggataactgctggtgctcttcctcgtggacttcatgccttgaatttgtctagaaacaagatctccactatagaaggattacgtgaacttactcggcttcgtgtcctagacctcagttacaaccgtatattaagaattggacatggccttgcatcctgctcatctttgaaggagctgtacctggctggaaacaagatcagtgaagtagagggtctgcaccgccttttgaaactaagtatcctggatctctcttttaacaaaatttcaactgccaaatgtctaggccaacttgcagccaactacaatactttgcaagctatcaacttggatgggaatccagcccagaaaaatgttggagatgaacatatgaagaaatatctacaaggccttcttccccatcttgtctactataatcggcagcctatgaaagtgagctctttgaaggatggagcagaacgttcagttcggttaggaatgaattcccatcagtttgatcgcggccttagagcggatcgcaagaccacaaggaagggcagccaaggtgttgcagccacacggaggccatcaatcacgtctactcatgctcgcagaagtgtggattcaccaaaactgtccaagggtaagcagcctctcctgccaccaactagaaccaaagtatcaacccaaagtcgctatcattttgatgctcccgacaaagcattgaacttggtttcagagctctccatgcgcaagagtcgcagtgagggaaattttggagttctgtaagaggctgttccataccaaattgatttgttcaccgcctttctttcagtatatgcatctatttactttgttatttcgtatttgtcatgtttttctgttagcacagtttatcccctctcttttgattaagtttggtgcactagatattgatacattgatttgtgggctgtaatgcctaataagctgctttatgctacagtttttctattccattataggttgtgttgttcagtactttcagaacatcattttcaatnnnnntg

SEQ ID NO: 8443 - DNA, 1094 bp, Glycine max
gttgggatccgtggtgcctttcaccacaatgcagagtgctgtgagccgcgcctccccggagagtttggcggttcccactttcagagttggttacaccatcaccacggatgcactcgatgccttgtacaagaagatcaagtcaaagggagtcacaatgacagcattgcttgctaaggctactgcacttgcgctggttaaacaccctgttatgaactctagttgtagagatggtaatagctttacatataatagcagcatcaatattgcagttgctgtggctatagatggtggactgattacaccagtgcttcagggtgctgataagattgatgtctattcattgtcaagaaagtggaaggagttggttgataaggccagagcgaagcagcttcaacctcatgaatacaacactggtactttcactctgtccaatctgggaatgtttggcgttgatcgctttgatgctattctgccacctggaactggagcaataatggctgttggagcatccgagcccactgttgtggctacaaaggatggtcgcattggcatgaagaaccaaatgcaggttaatgttaccgctgatcatcgagtaatctatggtgctgatttggcttcattcttgcaaaccctgtcccagattattgaggaccccaaagatcttactttctagtctcattttcctaacagtgaaaaagcgtttcttttctggcatgattcctctcatcatggttgtgggattattaattgttgacaaggagaaatcgaggagtcaattgctattcactcgggattttgcaaagaacagaagagttttaaataggaaaagctgagctatagtttcttaaaatgatatcgaatatgccatttacatttttctttaatgctgcctgattttatttttttttgttttttgggatgttcattactgtctaataatgttaattatttatgtaagcttaaagcttatttttggattctaaatcttgaaaagtgaaactataaggattgaacgttgattatgttatggaaccaggaaaggttagtgatgaagaaaaaaaaaaaaaaaaaaaaaaaaaaaaaacgagactagt

SEQ ID NO: 8444 - DNA, 1674 bp, Glycine max
ggtccggattcccgggtcgacccaccccgccgccggctcgtccacaatccaacgtagaaaataaaaatgttaggttaagaggttacatgcggtgatgtggtcggagcagtgaataacactagcactagaatgcaacgttactaacattgggggctatggtggttggttttggttagagttggaacctccgtcttctttcgatgaattcgaggacttaattaacacttcataaacacacatatcatttcgtttcttctcttcattccattctcattcaatccaatgatggctcaccttctccacactccctttatcccttcctcctccgcgctccgccgcgccgcccccattccccaccgcaaaacgaccactccactcgtcgttcgggccaagatccgggagattttcatgccggcactgagctccaccatgacggagggcaaaatcgtctcgtggaccaaatccgaaggcgacaagctctccaagggcgacagcgtggtcgtcgtcgagtccgacaaggccgacatggacgtcgagaccttctacgacggctacctcgccgcaatcgtcgtcgaggaaggcggcgtcgccgccgtcggatctcccatcgcattcctcgccgagaccgaggacgagattcctcaagccaagtccaaagcttcttcctcctcctcttcctcttccgcacccgcacctgcaactgcacctgcaccagcaccgccggtggaatctcaaccggaaaaggttgcggcgcccgtcgcggcggcggttgcagctccggtcgtagcgtccagtcatcctgcttcggagggagggaagaggattgttgcttcaccttatgcgaagaagctcgccaaggagttgaaggtggagttggggaggattgtggggactggaccgatgggaaggattgtggctaaagatgttgaggcatttgcagctgcagggaatgttgcagcagcggtagcaccagcactggggaagagtgcagcacctgccggggtagagttgggatccgtggtgcctttcaccacaatgcagagtgctgtgagtaggaacatggcggagagtttggcggttcccactttcagagttggttacaccatcaccacggatgcactcgatgccttgtacaagaagattaagtcaaagggagtcacaatgacagcgttgcttgctaaggctactgcacttgcacttgttaaacaccctgttatgaactctagttgtagagatggtaatagctttacatataatagcagcatcaatattgcagttgctgtggctatagatggtggactgattacaccagtgcttcagggtgctgataagattgatgtctattcattgtcaagaaagtggaaggagttggttgataaggccagagcgaagcagcttcaacctcatgaatacaacactggtactttcactctgtccaatctgggaatgtttggcgttgatcgctttgatgctattctgccacctggaactggagcaataatggctgtgtgagcatctgagcccactgttgtggctacaaaggatggttgcattggaatgaagagccaaatgcaagtcaatgttacgtgtgatcatcgaggtatctatggtgatgattatgcttcattctttgaaacgctgactcaaattattgaggaccccaaagatcttact

SEQ ID NO: 8445 - DNA, 1370 bp, Glycine max
tcgtacggctgcgagaagacgacagaagggggtgtgaagtttttgtcagaaacaaacagaataagaaagagaggaagccgtagattccaacgctttctctctgagtcacacacacacacacattgcagcaacaacaacaaccacacccgattccatgagtcgctacgatcccaatcccttcgacgaagaaccggtcgaggttaatcccttcgcggatggagcagctaaaggaaaaggctcagggcaatcaagttatagtggaggtgcattttatactactaacactggaagtgttccctcctcaaactcaaggctctcaccccttccaccagagccttatgatcgtggggcaactattgacatccccctaaataatgcaaaggacgcaaaagcaaaggagaaggaacttcaagctaaagaggctgaattgaaaagaagggaacaggaactaaaacgaagggaagatgctatagcacgagctggaatagttatagaggagaaaaattggccaccttttttccccatcattcatcatgacattgcaaaggaaataccagtacatcttcaaaggatccagtacattgcatttacaacatggttgggtttggttctgtgtcttttgtggaatattgtggcagttactactgcttggatcaaaggagaaggtccaaccatctggtttcttgctattatctattttatttctggtgctccaggatcctatgtgttgtggtatcgccctctttatcgtgctatgaggactgacagtgctctgaaatttggctggttcttcttgctttacatgttgcacattgccttttgcattttagctgcagttgctccaccaattatcttcaaaggaaaatctctcacaggcattttggctgcgattgatgtgttgggagacaatgcattggttgggatattctacttcattggatttggccttttctgtctcgagtcagtgctgagcatctgggttatacagcaagtatatatgtacttccgtggcagtggcaaggctgcagttttaaagcgtgaggctgcgagagggacaatgatggcagctctataacatggcacttacaattgttttcctaatggatatacccgaaaaatgatttcttgagttaccattaccagttctccttacaaactttactctttgtttaatactgggatgcgttttcctaggtttgtgtcaaaccagataattaagatagaagcttagttgtgcatatatagaaatcattgtttgagatagccccttaacaaatgatttatttcagcatttttttttatattttttattaacaaaatactccatctatcttgtgggtttaaaaaaaaaaaaaaaaaaaaaaaaaatt

SEQ ID NO: 8446 - DNA, 1245 bp, Glycine max
tcagctacgtaggcccccccccccggtgtgtgaagtttttgtcagaaagaaacagaatcgggaagagaggaagccgtagattccaacgccttctctctcagttacacacacattgcagcaacaatcacatccattttttctctatcactctgattccatgagtcgctacgatcccaatcccttcgacgaagaaccaatcgaggttaatccattcgcggatggaacagctaaaggaaaagggtcagggcaatcaagttatagtggaggtgcattttatactactaacactggaagtgttccctctgcaaactcaaggctctcgccccttcctccagagccttacgatcgtggggcaactattgacatcccccttgataatgcaaaggacataaaagcaaaggagaaggaacttcaagctaaagaggctgaattgaaaagaagggaacaggaactaaaacgaagggaagatgctatagcacgagctggaatagttatagaggagaaaaattggccacctttttttcccatcattcatcatgacattgcaaaggaaataccaatacatcttcaaaggatccagtacattgcatttacaacatggttgggtttggttctgtgtcttttatggaatattgtggcagttactactgcttggatcaaaggagaaggtccaaccatctggtttcttgcaattatctattttatttctggtgctccaggatcctatgtgttgtggtatcgccctctttatcgtgctatgaggactgacagtgctctgaaatttggctggttcttcttgctttacatgttgcacattgccttttgcattttagcggcagttgctccaccaattatcttcaaaggaaaatctctcacaggcattttggctgcgattgacgtgttgggcgacaatgcattggttgggatattctacttcattggatttggctttttttgtctcgagtcagtgctgagcatctgggttatacagcaagtatatatgtacttccgtggcagtggcaaggctacagttttaaaacgtgaggctgccagaggcacaatgatggcagctctatgacatggcacttacatttgttttcccaatggttatatacccgaaaaaagatttcttgagttaccagttttccttacacactttgcgcgtcacaaaccagataattaagatagaagcttagttgtgcatatatagaaatcattgtatgagatagcccctttacaaatgat

SEQ ID NO: 8447 - DNA, 1596 bp, Glycine max
aattcaagttgttatcgtctctctctcaccaaactgaaaaaacgcggaattgaaaccaacctttgtttaagtctcacaccttacttgctaccttctttcttcttcaccttcgcacccattattcattgcatcatctttcactcgcatcagaatcacagggttcagttgctgtggatagttgttaaaatttgccttcaggttgaaacttatagtgttgggtcaggatattatgattaatggaaatggtactcagactgagtattggggcgaaagttcgggttcaacttcccatagcagtcagcaggatgtggaggatgacaggatgattgctcttgtgctgtctgaagagtatgccaaattagatggagcagttggccggcgccttaccaacttggaacctgttcgtcatgtaccccggataaattcctttatccccactgtaagtgatgccagtatggatcaccagcgtctgcttcagaggttgaatgtctatggtttatgtgaggtcaaggtatctggagatggaaattgtcagttccgtgcactttctgatcagttgtataggtcacctgaacaccacaagcatgttcgcaaagagatagtgaaacagctcaaagatcaccgttccttatatgaatgctatgtaccaatgaagtacaaaaaataccacaagaaaatggctaaaactgcagaatggggggaccatgttaccttacaggcagctgcggataagttttctgcaaagatatgccttctaacatcattcagagacacttgcttcatcgaaattatgccactgtaccaagcaccacagcgtgaactgtggttgagcttttggtctgaggttcattacaattcattgtatgaaatccgagatgcaccaatccagcataaaccaaagaggaaacactggctgttttaagagaggcagatataagcatcatggtcctaagatgaaatgctgtgtgtacattttgtatcatttataggtaaagggggaaaaaaatccataaaacggcctttcaactctgaggctttggcaagtagaactcttgacttccaattgagaattgaccacttttcagatttggaagatatcttaatagcccactactttctactttttgtttgtcagtttatctttgccactaccttcacaccatttcaaccacccccgttcacccgttggatcttttggcgatcagctccttgcatgatccaagatatctaaacatcactaatcctttatgaacacaaagtagctattaattattcagtgagggcaaactacaaaattgaacattgaaaattctatttgccaaagtattaatgatacagtaggttgtggacatctttttcctacacataaaagaggaggcacctggagggaaagaaaccacttgtttttttttcccctgtatattgttctttacagtatactagtgatgatttttttattaatttaattttttattttgattatgtctttttaataggggagagcagtccattatgatttgtattttatatcattcctttttaaagcagcaaatcatgtattgatttactgaatttttaaaactgtttgaaccttgc

SEQ ID NO: 8448 - DNA, 1229 bp, Glycine max
tttttttttttttttttgtcaccagaagatttacaagttttgttttgttttgttttgatataaacgaatagtttgctcattgcggtttgatctatttccccacaaatattaatatatgcactctatttttataactgcagagacatccgacatgcgcagccaactagacatgacgaacaaaacctacaaaaagaatttaatacacacaagcaaacacacacacacacacacacggtataataataaactttaaggttcatctgggccttcatctcccatttgttctgcttcttgcaacatgttcataagcatgttcacttgttcttgcagcattgcattttctctttccactcgagcgcgtttgcttttttcatccacaagctggagttgcaagtgctctagacaccgtgaatcctcctccagctgttcattcagcccatcaatttccctgtcctttctgttcatttcttgaatggcaatccttctcatgctttcaacaacatcgacattaacgagttttctcttcttgccaatcagccagcccttcggatagtttgcagactcaaagtcaggaggaggaagtaaagactcggccgagggtcgtcggccattaatattcattataggttctaaaggttcaaacagagcctttcggcgctcagaaatcggagtcgtgttctgcacctcctcactagaaggtggaggagtatcttcctgcttgctgggtggtttattagcagtatcttctgatacctctaaattcctcccgctagctgtggggaacaagttaccatttttgtttttggcagctcatttagacagtaaatttgcacaacaaaggaaaaataaaatggaaaaccttttttgctctaagttgtttgcaaagtagtcatatccattgtactcaacaaatgcatccaatgattactacatgacggatatagttaatgagtaaacaccgcaaattatgagctagtttaagaccatcacaatttcaattaatctttacatgacgcgtaatggagtgttattagttctttcttgtaaattaaaaaacttgaatacatattacatagagattaattgtaaccagagacctgtaatagtctgaaacttcctaataattgctcatttatcatagttgccaagatgaaaactgttgttagtgagatataatatcgattttgatcatccttcaaaaaaaaaggggggggggcctacgtagctga

SEQ ID NO: 8449 - DNA, 930 bp, Glycine max
cccacgcgtccgcccacgcgtccctcggtagtattgcagtttattctatcatatccttgttcaaataattttcttttcaattacaataccccaatcccagaaacttatgttcatgaccatcctcaaggtcccaataacatttacttgaagacaattttgagttgaccttacagcctagttccacctatacaaacacccttgatccttcattcttttttgagttgaccttacctagctccaatactggcaacaataatactcttgggcatctgaactatctccattctttttttccccctttctttgcagtggatttgcgaggttttaaagaaattaaatgcgtttttatgtgctaaagagctaggtaattatagaattcatctcacacatacttctttttactaccttttatcttttagattttattcttgaattatcgttgtttaacggagtaatttaattagttgaggggttgtggaatttgtgtagaagattttcctataagaatttttaattcgctaaagaaatcctcttgttgaattagattattatgagattaactacttcacaaaattccacaactcctcaacaaattaaagatctttgttgaacaaagttaatttaagagtaaaatctagaagatagaggttgtaaagagaagtggtgtgagatgaaatccataattagctagttgtttagcgcatgaaaaaaagtgtttaatttttttaaaatctcacaaaccctgcaaggaataaaaaagaaagaaagatcggagatagatcatatgccctaatagtatatgaagaaatctttcccgtaaaacaaatataaatgatatacatgtgtgatatttttttctgctgaaaaagttcacttcagagagattgttcaaagttcaaacgtgtacgagtggaaaaatgactttcaaaa

SEQ ID NO: 8450 - DNA, 1530 bp, Glycine max
ggtccggattcccgggtcgacccacgcgtccggtttgagagagagagagggagacacaacacaagggtcggctccgtggggcccccccccccccccccaaaaaccaagtgaaatcaatagccatgaagatcgttcggagagacctagtacctaatggacctggcagcgttaagatggtggcagtggattcggatgatctctggtttgcgtataacttgatagctcccggagactctgtcatggccgttactgtcaggaaggttctaagagaagctgctaatggcggacgggaagcagaacgcgtcaagctcaaattggaaattaaagtcgaagagctttctgattatgacaaagaaggttctattttgcgtgttcgtggaaagaacattttggagaatgaatatgtcaagattggagcatttcatactttagaactcgaactgcagcggccgtttgtgctcagaaaggatgtttgggattctttggctttggaggtactacagcaggcctccgatcctggtgcaagtgctgatctagcagtggtgttgatgcaagaaggattagcccatatcctccttgttggtagaagtatgactgttactcgttcgcggatagaaacatcaattcctcgcaaacatgggcctgcaattgctggttatgagaaagctttggataagttctttcagaatgttttgcaggctttcttgaaacatatagatttcaatgtggttcgttgtgctgtaattgcaagtccaggatttacaaaggatcagtttcaccgtcacttatttttggaagcagaacgaagacagttgcgacctattattgaaaacaaatcccgcatcattcttgtgcatacaagttcaggatataagcatagtttaaaggaggttttggatgctccaaatgtcatgagtttgataaaagatactaaagcagcacaagaggttcgagttatgaaggatttctacgacatgctttcaaatgatccatcacgtgcttgttatggaatgaaacatgttgaggttgccaatgaacgactagctgtacaaatgcttctcattacggatgagcttttcaggaattcagatatagcaacaagaaaaaagtatgttaacttggtcaactctgttaaggattcagggggctctgtccatgtattttcgtccatgcatgtctctggagaacaactagcccagataagtggcattgctgcgattcttcggtttcctctccctgatcttgaagacattgagatgtgatggacaatgttggtcaagcatgttaatgttggccatggctctctctgttttttactattcttaaatactcagctgatgttgcaagttgcaacagtccctgagtaatcctagcggtcttgtattacaaaccacacaatgctagtgtaaaattcatagtattacatcagactttattgagtggttaaatatctttgtatattttccccttaaagtaagtgtcttttttaaaaaaaaaaaaaaaaaaaaaaaaaaaaaaaaaaaaaaaaaa

SEQ ID NO: 8451 - DNA, 773 bp, Glycine max
aaaaaagcccaacaaactccaaaccctaattcaataaattgcttaatccccaagcccgacctgccgcaagcagagatgacaacccgatttaagaagaaccgcaagaagcgcggccacgtcagcgccggccacggccgtattggaaagcaccgcaagcaccccggcggccggggaaatgccggcggcatgcaccaccacaggatcctcttcgacaagtaccacccggggttcttcgggaaggtagggatgaggtactttcataagctccgcaacaaattctactcccccatcgtcaacatcgacaagctatggtctctgataccccaagacgcgaaggacaaagccctaaaatcgaaggacactgcccctctaatcgacgtcactcagcacgggtacttcaaggttctcggaaaaggtgtgctgccccaaaaccagcccattgttgtgaaggccaagcttatttcgaagatcgcggagaagaagatcaaggaagccggtggtgctgttcttcttacggcttaggttaatttttttttcccatacattcgaggttgttgtttttgttttgtgtgttttgtttcggatgacttttttatattacatattgcaagtaatacattgtgtttttttattgtttcgttgttgtcggattcaggttaattaaaaggtttatgcgaacaattttgcgctaatgtcctaaaaaccttgttgtgataggaaatttattggaataattgaaacgaaatttgggaggattaaaaaaaaaaaaaaaa

SEQ ID NO: 8452 - DNA, 932 bp, Glycine max
aaaaaagcccaacaaactccaaaccctaattcaataaattgcttaatccccaaaccctaattcgtgccgcaaacagagatgacgacccgattcaagaagaaccgcaagaagcgcggccacgtgagcgccggtcatggccgtatcggaaagcaccgtaagcaccccggcggccggggaaacgccggtggcatgcatcaccacaggatcctgttcgacaagtaccatccgggcttcttcggtaaggtgggaatgaggtacttccataagcttcgcaataaattctactcccccatcgtcaacgtcgaaaagctatggtctctcataccccaagacgcgaaggaaaaagccctaaaatcgaaggacactgcccctctaatcgacgtcacacagcacgggtacttcaaggtcctcggaaaaggtgttctgccccaaaatcagccttttgttgttaaggccaagcttatttccaagatcgccgagaagaagattaaggaagccggtggcgctgttcttctcaccgcttaggtttaaaaactgttttttaattgtgttgttttgtttcggataacttttttgattatatattgcaagtgatacattgtgtttttttttagtgtttttgttgttggatttaggttgattaaaaggtttatgcgaacagttttgacctaatatcctaaaaccttgttttaatgagttgtgataggaaatttattggaataagggaaacaaattttggggaggattataataatgaacaagaattaataaagagtgcggtcgattacaccaaattattagtgttccacgaacataacaacgagggatggaatgacctgcaatcttggtgctactgcactgcttctgaatttgtgtgattgaatcttaatattattattggaagcagaatcttaatattattattggaagca

SEQ ID NO: 8453 - DNA, 990 bp, Glycine max
gttttaaattctacaaccagactcatgaaatctcctcctcaatagttaactaacacatccttaaaatattcctcttcaatctgctcaatcttccactcttgtgttgtcttgtgtgtgtttctccgcctagtcctagatctgtctccccaatggctggtttcttctctcttctaaggcgcctctatctctccctttacaattggaccgttttgtttggatggtgtcaagttctgtattttgttctcaagacattgaacgaatcgggtcatcaacatgtttacagtgcagcagaaaaacctttgcattatgctcaaagcgctgctgtgttagagattcttcatggtttggtagggctggtgaggtctccagtaacagcaacattgccacagataagttcaaggctgtttctggtttggggcatcttatggagttttcctgagactcggtcccatgtgcttgttacctccctactaatcagctggtccatcacagagatcattcgctattctttctttggctttaaagagacttttggatttactccatcatggcttttgtggcttagatatagcagcttcttagttttgtatccaacaggcataagcagtgaagttggtttaatatacattgccttaccattcattaaggcgtctgggaagtattgcataaggatgccaaacaaatggaactcatcatttgattacttctatgctgcgattgttgcaatgggaatctacgttccaggtagccctcacttgtacacatacatgcttgctcagaggaagaaagctctctccaaatcgaagagagagtaatgcaacatcagtagttttcattgattttgggtcaaacgtaggatatatacacatgtcatatcttggtttggattcacatataggtatcagggaaacgctgattgcttttcatgttaatgtatcattaaaaggcaacatgccagagataaataaactagttattttgttcttctgc

SEQ ID NO: 8454 - DNA, 984 bp, Glycine max
atacatcagctacgtaggcccccccctccttcccactgatttcagtgctgagcctctgtagaaatttgtgatggcatccgctatggtgaatcgaggtggttctaggatcatcaaatcagtgtctgcagctcttggtacgaggttttacgccaaggttgcaacagggactgacatagtctctgccgcacccaatgtttctctccagaaagctcgtacctgggacgagggcctggcttccaagttctccaccactcctctcaaagacatcttcaaggacaagaaagttgtcatctttgggctcccgggtgcatacacgggagtttgttcaaacaaacacgttcctccttacaaggagaatattgataagtttaaggctaaggggatagattctgttatttgtgtggctattaatgatccgtacactatgaatgcgtgggctgagaagcttcaagccaaagatgctattgagttttatggggactttgatgggagctttcacaaaagtttggaattagttactgatctctctggtgcattgcttggaactcgatctgaaagatggtcagcatatgtggtagatggaaaggttaaggctcttaatgttgaagaagctccatctgatgttaaagtttctggtgcagataccattttgggacagatttgaagtttctgttggtttgcatgtaggtagtaataagttttcaataaaatgtacctgatacttccagctgattcaatgttttgactcagattttttgttgagttttggacttctttctgttgtaactggtaactactcctttcttccctggatgcatggttatttggttgaacgcaatcaagatgtaaggaaaattttggttctctttaaatgactgtacttaaattttaattagactgagatataacttgcaaatattcgttgtattgaaatatagagattttaaacaaaaaaaaaaaaaaaaaaaaaaaaaaaaaaaaaaa

SEQ ID NO: 8455 - DNA, 1062 bp, Glycine max
  misc_feature (2)..(2): n is a, c, g, or t
tngcgtctccgctgccggggcgaggttttggagttacagccgcagcttgaaacagagcagagcgaccttgaagagctatggctgtcggaaagaataagaggatttccaagggaaagaagggtggcaagaagaaagccgctgatccctttgccaagaaagactggtacgatatcaaggccccttccctcttccaggtcaagaatattggcaaaaccctcgtctctcgtacccagggaaccaagattgcatccgaaggactcaaacatcgggtttttgaggtctcattggctgatctccaaggggatgaagaccactccttcaagaagattcgtttgagagctgaggacgttcaagggaagaatgttctgacaaacttctggggaatggatttcacaactgacaagttgaggtctttggtgcgaaaatggcaaactttaattgaagctcatgtggatgttaagaccactgataattatacattgaggatgttctgcattggctttactaagaggcgtagtaaccaggtgaagaggacctgttatgcacaatcgagccaaatcagacagattcgcaggaagatgagagagataatggtcaaccaagcaacagcatgtgatttgaaagaattggtgcgcaagttcatccccgaaatgattggaaaggagattgagaaggcaacatctagcatctatcctctacagaatgtgttcattcgtaaagttaagatccttaaagctccaaagtttgatcttggaaaactgatggaggttcatggggattactctgaagatgttggtgccaaggtggacagacctgccgatgaaacattggctgaggaagccactgaagtagttggggcttgatctggctcataatgcatttttgttattttagaattcctgtttctcttacaaatattaattttcagttttgttttaatatttagaaacacatttgttgcaaatctaaatctggatttttgttttgtcaaggttttttggtacaacccaataactaaacacggtatgaagacgagaaattttcttattgtcttcctagttg

SEQ ID NO: 8456 - DNA, 1298 bp, Glycine max
gaaaaaaaatgtgctgctaccttacaaaggagaatgtgcgagagggagagaaaaaggtagcggagaagatgatataatgtaatttgattttagaaagaaaagaaaaagggagtggatataggcatagaaatagcttccttcgataaacaaagcccaagcgggaaacaagcccaagtagggttttaaagaatataaagattaaagaggaggtgtgctgagacaggtagggtttcgagttacagccgcaccttgattcagagcagagcgaccttgaagagctatggctgtcggaaagaataagaggatttccaagggaaagaagggtggcaagaagaaagccgctgatccctttgccaagaaggactggtacgatatcaaggccccttccgtctttcaggtcaagaatgttggcaaaaccctcgtctctcgtacccagggaaccaagattgcttctgaaggactcaaacatagagtgtttgaggtctcattggctgatctccaaggagatgaagaccatgccttcaagaagattcgtttgagagctgaggatgttcaagggaaaaatgttctgacaaacttttggggaatggatttcacaactgataagttgaggtccttggtgcggaaatggcaaactttaattgaagctcatgtggatgtcaagaccactgataattatacgttgaggatgttctgcattggctttaccaagaggcgtagtaatcaggtgaagaggacctgttatgcacaatcaagccaagtcagacagattcgcaggaagatgagagagataatggtaaaccaggcagctgcctgtgatttgaaagaattggtgcgcaagttcatccctgaaatgattggaaaggagattgagaaggcaacatctagcatatatcctctacagaatgtgtttattcgtaaagttaagattcttaaagctccaaagtttgatctaggaaaactgatggaggttcatggtgattactcagaagatgttggtgccaaggtggatagacctgctgatgaaaccttggctgaggaagcaactgaagtagttggagcttgatccggctgataatgcatttttgtttgtttagaattcctgttgcttttacaaatatttatttttcagttttgttttgacatttagaaacacatttgtttttgcaaatctaaatctgtttttttggcaaaggtttattggtacaacccaataaccaagaacggtatgaaaggcgtaattttcttaaaaaaaaaaaaaaaagggcggccgaaaaaaaaaaaaaaaaaaaaaaaaa

SEQ ID NO: 8457 - DNA, 3473 bp, Glycine max
tacatgccattccaagtctgtattactgcacttattttgtgcaatgtgtttatgtttttcatgctgtttctcatttaggacacttcctgaagaatttgaaaagtcagcttcctcagacaaggatacttgcaatttcagctttgaatacactattcaaggaatctccatataagctgtctcatggtgagaaatctgccgtacttgaggatttgcaagaccatgtcaaatcatcacttgaaggaactttaacgcaaacttttcaggaagagggtttcttcaatgagacactgactagtctttctcatgttcatataataactgatactgaaactgcttcaagaggaggtcagggagattcaagtttccaaagcttagcagacaaatccataactcgtttttactttgaattttcggcttcatggccacgtacgccaagttggatctcctttttaggaagtgatgataccttttattcaagttttgctcgtatttttaaacggctagtacaagaatgtggcatgcctgtcgtattggctcttaaaggtgcagtagatgagtttataattgctaaggagaggtctaaacaatgtgtagctgctgaagcgttggcgggtgtgctacattctgatattgatggtctatcaggaacatgggaaagttggctgatgcctcagttgaagaacatcattttagcccaatctgttgaatcagtttcagagtgggcatcttgcatacgatatgcagttactggtaaaggaaagtatggaacaagagttcctcttttaagacagaaaattctggattctttgatgacacctttacctccaacagtagctactacagtaacagccaaacgatatacttttctggctgctgcacttatagaaatatccccacagaaaatgccagtagctgaaatccagctccacaatacacttctgaaggaagttcttggtaatatgtgccactcatcagcccaagtgagtcagcacgtaggcccccccctttctatattgtgctctaacattaggctctatcattcaagccgtcatgataatgcacaggatgagagaaatgacaatgttgatagtttgatgaaagatgaaagctgggttcagtttcttacagagcgagcagctgaagcagttgtcaacattcagattgctacccaatcagataaagtagtgaatcctgtagattcaagttctcaaaatgggcatctagatggtgattcacaagatgacattaaatggatggaaacgctactctacttcatcatctcatcattgaagtctgggagatcctcatatctgctcgacgtgcttgtgggacttctatatcctgtgatttgcttgcaggaaacatcaaataaggatttgtcaacattagccaaggtagcatttgaattgctcaaatggatgattgtttgggaacctcaccttcagaaggctgtatctgtgattcttactgctgccaatgattccaactggcgaactagatctgctacattgacatatctgcgcacattcatgtacaggcacacttttactctctcaagttcaaagaagcaagagatttggagaactgttgagaagttactagtagacaatcaaattgaggtaagagaacatgctgcagcagttttagcaggcttaatgaagggtggagatgaagatcttgctagagatttccgtgatagagcttatagggaggcaaatattgtacagaagagaagaaagtcgagaaatgcaagttctggatcatcaatagcatctgttcatggtgctgtactagctttggtagcttctgtattatcagccccatatgacatgcccagttggttgcctgatcatgttacactacttgctcgcttcagtggggagccatcacccgtgaaatctacagttactaaagcagttgcagagttccggcggacccatgctgatacatggaatgttcagaaagaattttttactgaagagcaacttgagattctggcagatacatcctcgtcgtcgtcatattttgcttgataaaaaatttcaaagatattgttgggagagagggtactgaaataattggttagggaaagtatgtttttcatttttggtgtattgactgtattcatagttgttaaaatagcttttatttacattttgtaccattgatcatgtaagaaatttattccttaataatctagtctcagaagttgagcttcttgctttcctctgtctgttctgtaatttttcttagaccatggggttaatcaaatcgtccgttggtagatcccacacaacacaatctgagttgaatatattggataaatttctaatctccttcgtagcctcagaatcatcaccgatttcgtcttcaagtttttcatgtaactggctttgctgatccatgacagtgcatgtgcttccagtacatacactttggctccatggagatgcatcatcccctttgccaaaagttgccggagagaattgaaacccaggcattgtaggaaaaacaccgtatggcatcacaaaatttgcagatgtagttgcattggagtcccaaggtttgtttgcgggcatcatttctggttcatgttgtatggcctttgataggtcaaacttaatcttctcaatagctgtgtccttttcatctggcttacaattaatgtaatctgtgaagttattttccaatgctgcagtggaatgttgcccctggtggaagttaattggcttcttggtaagaaggtggagcacctcatctttgaaacagccaagggccgcttcagcaaggtgagctgcttgtgggggtgccaatgttgtagcaatttcagccattagatgggaaaatggcttgtgggtgacagggtctatacccatgcctgacagtttcttcttcagcttggtgttccagtggtttttgacatcattgtcagtgcgtcctggcagctgggctgctatcagtgaccatctgttaccaaaaactgagtgaagcttcacaatggtttgctcttccgaatccgagaattggccatgtttgagatcaggacgaaggtaattagtccaccttaatctgcagctctttccacatctctggaggccagcattcttgggaatgagacgccagttgcgagtgccgtgttgagcaatgtaggaggagagcttgttatcttcctcaggtgtccactgtcctcttttcacgttgtccttctcacaacatggaatacgtcccatttctgttttcttttttctttttcaataagaaattcctattttaagggtagtgaggacttgaataactgaggggactgttgggaataataattgtcttttcttttctttttttctccacaacttgtgaactctctctctaccagtctttgatttctttgagatgaaaagggaagacgtggaatatttctttgagtttgttgttgttactttcttttttctgggggggggggcctacgtagctga

SEQ ID NO: 8458 - DNA, 1544 bp, Glycine max
tcagctacgtaggccccccccccccccccccgaagttgaaaattttagatatttaaagcaaatattgtataaataaattccgaaagcgaaaaaataattaacaggttaatcgattaatcaatcaccaccgtgtccgttgaatttgatcattcagcgcaactctgcaaatcacatcatcatggtggccgtaacccgcctcgcgaagcgcgcgtcaaccttctcaccccagatgaggaggtgcctgagctcctccgaagtcaaatcccacgcgccgccgcacgacgccgcgtccttccgcccgtttccgcggcgcgaagatctgagcaagcggtgcgtgcagtgggcgttcctcggctgccccggcgtcggaaaaggaacgtacgctagtcgcctgtccaacctcctcggcgtccctcacatcgccaccggcgatctcgttcgcgacgaactcgcctcctctgaccccctttcttcccagctatcagaaattgtaaaacaaggtcaattggtgtcagatgaaattattatacgtttattgtcaaagagacttgttgctggggaagctaaaggcgatctgggatttattcttgatggttttcctcgaacaattaagcaagcagaaatattggaaggggtaactgacattgacttggtaatcaatctgaagctccgagaagatgttctgcttgagaaatgccttggtaggagaatttgcaatcagtgtgggggtaattttaatgttgcttctattaacatcaaggccgagaatgggagccctgaaattattatggctccacttcttcctcctgagaattgtatgtcaaagctcattactcgatcagatgatactgaatcagtggtcaaagaaaggcttcgaatatacaatgaaatgactcagcctgtggaggaattttaccgttcgagaggaaaattattggagtttaacctgcctggaggaatcccggaatcttggcctaagttgctacatgctcttaatcttgatgattacgaggacaaacgatctgctgcagcataaagatataataatgtatcataacagtaagtatttcattctttgcgtgcttatattgcatgcttggcaattttgcaggacagagaaccaaagcaagggaacttctctgctagtattattttggaccaatgatgatatttgtaagtgttgtaatctgataagactggtagtgttgcgttttgttttcgtataatttggttatatgggaagggtttcctagcatataatgttattgtgaagagtgaataatatatcacagtattgctagaaagatagttggtcaggaatcaacgtcgataggattggtgcatcatcactattgttgtaaattaaatgtgaatgaacttattctattacatcaacacatcatcacatgctcgtgatttagggaaggcttttttactggagtaacttccaggaaaaaaattatttaatatgatgtttcatgttatttgaataagtcttttgatttcccaatactaatgaataactcctccttttctttgaaaaa

SEQ ID NO: 8459 - DNA, 936 bp, Glycine max
tgattgggccccacgaggcaaccaccttaaccggcgtcatccacaaaacgacgtcgtcactgtctctcacaagtcacaagtcttccttcccacttgcaccctctctctctcgccggtcgccgaatctttctccgcatccgcaacctccgccgtatccgcctttgattcttcaaccgatggatcggccggcgaccggacctggcgtggacatgccgatcatgcacgatagcgaccgctacgatttcgttcgcgatatcggctccgggaatttcggcgtcgcaaggcttatgagggataagcagacgcaagagcttgttgctgttaagtatattgaacgcggagataagattgatgaaaatgttaaaagagaaatcattaatcacaggtctctaagacatcctaacattatcaggtttaaggaggtcattttaacacctactcatctggccattgtaatggaatatgcatctggtggagagctatttgagaaaatctgcaatgcagggcattttaatgaggatgaggctcgtttcttctttcaacaactcatatctggggtcagctactgtcatgcaatggaagtgtgtcaccgggacctgaagttggaaaacactttgttggatggaagcccggcacttcatttgaagatatgtgattttggatactccaagtcttcggtgcttcattcacaacctaagtcaactgtgggaactccagcatatattgctccagaagtattgctgaagcaagagtatgatggcaagattgcagatgtctggtcatgtggagtaaccttgtttgtgatgctagtgggatcatatccttttgaagatcctaatgatccaaaggatttccggaagacaattcagagggttctcagtgtccagtattccattccagacaatgttcaagtttctcctgagtgtcgccacctta

SEQ ID NO: 8460 - DNA, 1428 bp, Glycine max
  misc_feature (11)..(11): n is a, c, g, or t
tcgagtcagcnacgtaggctcccccctcagctacgtaggcccccccccccccaatttgcaatattcatcaataatccatggcctatggcaaaggaacagattaacacttcacgggcaacaacataaatggcttcttcaagcataacctgcacctttcactgtaacctccatccttcaatatcccttccaacctcagccactcgtttttccttatctttttcccaccctctactttgcacctacaatggcctttcccttcacccttcaagctccagcttcagagtttttgccaagtttgagaaattccaaagccaaccttcccaatcccaagagcctgacccttcaccctcactagaagaaaccacagaaacttctgtccaggatgatgaggaagatgacagttgcttgccttcagacttggagggtgcagtgcggcaatcaagcgaggccgcggccacatttgtatcttcaggagggatgagagccatagttgaacttttaatcccccaactgcaatttttagatgacgaaggcgcgcaaggggaactctgggaattgtcacggatttttttggatacactcattgaaaaaacaaaatcccagagagttaaagccatatttccagatgctggtgctgcagcccttctgaaatatcggtggaaagatgctctatttagatttgcaagcttaagtgaccggaagcctgtagaaagtgacgatgagatcgtggttatgattgttcctgattatcagatgttagagtatgtagagagaattgcatccaatctcacaaatgttcctgaacctacgcccctcatcatgtggaatccacgcctgattagtgaggatgttggagttgggtttaatgtccgaaagttaaggcgcttctttctaagcacttttacaactgtctatttcatgagacctatgccgtttggagcaatctttaggtgttatccaggattgtggaaagtgttcagtgacgacaaggaaaggccagatagatatttgcttgccaaggaattcgagagccgtcctgatgctgatgacatcgagcttctatttgctgatgaagatcagaagtcagagcaagggcaaggtttgcttgacaaagcagcaggcatattctcttcaattagccggatgatgaagtctatatgatgattgatgatgatctttcatacttgttctcatcattagtgcatcctgcccccattcatgtcaattatatgtttgctccttcaaaattaattttagaaaccttacagttataggcttacagcttttatcgtatactacaattcgtgtatacatattatgatgtatttggatatgtgccagattgtcacttttgttagtcaagtgttgatccctactttctattgaaaaataaaattgttttgccaaaaaaaaaaaaaaaaaaaaaaa

SEQ ID NO: 8461 - DNA, 1483 bp, Glycine max
  misc_feature (676)..(677): n is a, c, g, or t
  misc_feature (683)..(684): n is a, c, g, or t
  misc_feature (686)..(686): n is a, c, g, or t
  misc_feature (688)..(690): n is a, c, g, or t
  misc_feature (736)..(737): n is a, c, g, or t
tcagctacgtaggcccccccccccaaccaaatatatggatttatatttggagtaaggatgaggctgtccaggaagggatcccataagaaagaagttaaattaaattaaaagctatggaccaaaggcagtttatacgttgcatttgatcataccaagttacaagaatttccaaaattcatgaataatccatggcctctggaaaaggaacagattaacacttaacaggcaacaacataaatggcttcttcaagcataacctgcaacttccatccttcaatatcctttccaatctcagccactcgtttttccatatctttttcgcaccctctactttgcacctacaatggcctttcccttcacccttcaagctccagcttcagagtttttgccaagtttgagaaattccaaagccaaccttcccaattccaagagcctgacccttcactctcaccagtagaaaatacagaaacttctgttgaggatggggaggaggatgacagttgcttgccttcagacttggagggtgcagtgcggcaatcaagtgaggccgcggccatatttgtatcttcaggagggataagagccatagttgaacttttaatcccccaactgcaatttttggatgacgaaggcgcgcaggtggaactctgggaattgtcaaggatttttttggatnnactcanngnannnactaaattccagagagttaaagccatatttccagatgctggtgcannagcccttctgaaatatcggtggaaagatgctctatttagatttgcaagcttaagtgaccggaagcctgtagaaagtgacgatgaggttgtggttatgattgttcctgattatcagatgttagagtatgtagagagaattgcatccaatctctcaaatattccagaacctacgcccctcatcatgtggaatccacgcctgattagtgaggatgttggagttggatttaatgtccgaaagttaagacgtgtctttctaagcacttttacaactgtctatttcatgcgacctatgccatttggagcaatctttaggtgttatcctggattgtggaaagtgttcagtgacgacaaggaaaggccagatagatatttgcttgccaaggaattcgaaatccgtcctgatgctgaagacatcgagcttctatttgccgatgaagaacagaagtctgagcaagggcaaggtttgcttgacaaagcagcaggcatattctcttcaattagccggatgatgaagtctatataattattgatgatgatctttcatatttgttctcatcgttagtgcatcatgctcccattcatgtcaattatatgtttgctccttcaaaattaattttagaaacctttcagttacggcttttatcatatactacaattcaagtatacatattatgatgtgtttgaacaaaaaaaaaaaaaaaaaatttgttaaaaaaaaagaaaaaaggaaaaaaaagaaaaaaaga

SEQ ID NO: 8462 - DNA, 1355 bp, Glycine max
cttcactcttacgtctatcgctttcacctctctctctctctctctctctctctctctctctctcttcgattttgattttgggtttattttttcccccttttcaattttgttcatggtgttgagcgtgtcacggtaattggcgggaagtaaccgtcaattccgataaccctttggtgaaaagcttgaaacttgaggagtttgaagaaaagggggtttatcgtttcgtcgtggatgatggcgaacccatctggcaaccatcaagagcacacgcacgtggtgtcgtcttctgctccagagacttcaggtgcggctctcgcgatgaagcacaatcctggcatatccctcgattggaccgcagaagaacaagccattctcgaagatggactctccaagtatgcctcagaatccaacatagtacgctatgcaaagatagccctacagctacagcaaaaaacggttcgtgatgtagcactgcgagtcaggtggatgaataagaaagaaaatagcaagagaaggaaggatgatcataatttaactcggaaaagtaaagataaaaaggaaagggtttctgatcccgcagtaaagtcatctaactttgttgctcggtccaatgtctccccatatgctccaccaatgattgcaatggacaatgatgatggcatctcttatacagcaattggaggtcccaccggtgacctattagagcaaaatgcacaggccttgaatcaaatctccacaaatctttctgctttccaggtacaggagaacatcaatcttttctgccaaactagagataacatccttaaaattatgaacgagttgaatgactcgccagaggtgatgaagcaaatgccacctcttcctgtgaaggtgaatgaagagctagccaattccatactcccaagaacaaatcttccaccacaatcatgaattcatgataaacattcatacttaaccaggcttgcctcttgaatatttctgcctgcacctctgatcaggagaataactgccaaatgccaatcaagttgaccccaagatttacttttggaaaaaaagaaagaatgaataattgttgataatcatcaagttgaattagtttcaataattttattttattttatttttctaatgttggttttcctgcttttgtttctcttgttggcctaacttagctgtactataggaattatttagtattcttggtattaattgagttaaatttaggcaattaggtcaataagttgtggtataattttatttattgtctgttattttcgttgctacatttcattatgcatattttattagattcttgttaaaaaaaaaaaaaaaaaaactcgagactagttctctct

SEQ ID NO: 8463 - DNA, 557 bp, Glycine max
tgataaagcttagaagtagttcctaaggcatttttgtcttactttcttatcagaatgggagtttcacttcaataacatgtgcgacaaatgtttgcattaaagatcaacaattataattcaataacaataccaaaaacatccaaaaacatttaaagaactgcatctaagttttctgcttcacaaaaatattttagtatgaaatttcagccaacatcaccatctgccccagattcacccccatgaccatgaccacttccatcttgaactccattggcactcatcaaagaggtatgagctgcagtcatctcagcagcagctactcctacatcattgttagcaactgtgttggctccatgaacattgatgccaccaccatcaccaacaggagttgttgaagtacaccctttggtttttcccttgtgattaggcttgacatgggagagtttctctaaatctttcactttgctttccttgctcttgcttttgcgcactctgatgcagaaacagatggctttgctttccatgtttggaaaaagagaaatgaaaatacaccatgt

SEQ ID NO: 8464 - DNA, 2167 bp, Glycine max
  misc_feature (2)..(2): n is a, c, g, or t
  misc_feature (10)..(12): n is a, c, g, or t
  misc_feature (22)..(22): n is a, c, g, or t
  misc_feature (57)..(57): n is a, c, g, or t
  misc_feature (60)..(60): n is a, c, g, or t
  misc_feature (81)..(81): n is a, c, g, or t
cncaattttnnnttctatagancgtgtccggtgagaacaatttattgcggccggttnttnaccaaatagaatcttggtggngaaagttctcagctccgtaggcccccccccccccccccggggcacatcaaattctttatttataacatggagtactctgtggaaactttggaaagagatcttaagaacacgaggaaatactacgggagtggaaaaacaaaggaagcaccatggagagaatcacagcttaaagggttgcacaattttctcgtggaaaaagaggaagaaattgtgacggccctcaagcatgatttggggaagcattacgtggaggcttttagagacgagcttggaacattaatgaagaccttaaacttggcaaccaagtctttgaaaaattggatggcggggaaagaggcaaagctgccacgaatagcactgctctcaagtgcagaaatagttcctgagccacttggtcttgttctcataatctcatcatggaactttccctttggactttccttggagccactgatcggagcagtagctgctgggaacagtgtggttctaaagccttcagagttgtcccctacttgctcttctcttttagccactttcctcccaacttacttggacaataatgccattaaggtcatccaaggtggaccagaagtggggaagctactcttgcagcaaagatgggacaagattttcttcacaggaagtgcaagggtggggcggattgttatgtctgcagcagctgtgcatctgacgcctgtgactttggagttaggtggaaaatgtccagcactaattgactctctttcttcttcttgggacaaagaggtggctgtgaagcgaattttggtggcaaaatttgggtcttgtgctgggcaagcatgcattgcaatcgattatgtccttgtggagaagagtttcagttctacattggtgacactaatgaaggaatggattaagaaaatgtttggagaaaaccccaaagcgtccaacagcattgcaaggatagttaataaaaatcatttcatgagactccagaaccttctcactgagccaagggtcaaagaatcggtggtttatggtggttcaatggacgaaaatgacttatttattgaaccgacaatattgctggatccgccacttgattcagcagtcatggctgaggaaatctttggccctgtacttccaataatcaccctggagaagattgaagacagtgttgagttcataagctcgaggcctaaagctttagctatttatgccttcacgaaaaaccaaactctgcagagaagaatggtatctgaaacatcatcaggaagtcttgtattcaacgatgcaattctacaatacgtagcggataccctaccatttggaggagttggtgaatgtgggtttggcaagtaccatggaaagttctcctttgatgcgttcagtcaccataaggctgtggctagaagaagttacttgactgatttttggtttaggttccctccatggactcttgataagctccaactacttgaggtgtcttacaatttagactaccttggaatacttctagttctgctcggcttaaagaaatcaaaacggtcactatttcaggcttgtaactgatgtgcattatgttccttcacttatctatttcaagtgagcccctaataaggattggtgattccaagctagtgttaatttctaggtttatgatgcttaaataagtgtgttctatttgattctgtatgtgttatatgcctagttagacttgggtaaggcaaggtttgtatcaaggatctttgattctacttctattactattactttatactgaaaataccacaaagaagtaaaataaataaaaaataaataaggagaaggattttgtggatccgtatataccactagattcagagaagaaatcagccacagagacgtgtggaacaccagaaaaggacatgacagcacgcaagcttcactagcaaatgccctttatcttcaatttgtaatggtacgatgcgatttatgctaaggactattcccaacagcaatgcagttcaaaatcaatacaatagcacaagctattaactatccggaagtgcagagggcgcccaacaaaaagtgagcaagtcgaaccggaaataaaaccaaccgggcc

SEQ ID NO: 8465 - DNA, 1443 bp, Glycine max
gacctaaaaaaatatctggtatgtttgttttggttgtaccaaaaccctccacttgtttgttatgttcaattataccccttatcctcatgtcaatctccgcgttgtgttgtgaaactgtgatgtcctcctaaaaaactctatccatgtctatgatgtctctcacaaccgtggctgcattcaagtccctcacaatggcggaatcgtgccttctatccctcccttccctcttctacgccaaaaacaataccctttctctctcaattcccaccaagcccctcaacctccatcttccatgctccaactcttcgctctttcccctcaccaccaaaacaacgcgccactcttctctcctcacattcgtggctcagacatcggattgggccaaagaagaagaggaagaagaaacctcgtgggagaaccaaggcgacaccgcgtggggaactgaagaaggtggccacgaagaagggggtttcgctgaaaaagctgaggaagataagatcttcgttgggaacttgcctttcgacatcgacagcgagaatttggcgtcgctcttcgggcaggctggcaccgttgaggttgctgaggttatttataatagggccactgaccggagtcgtgggtttggatttgttaccatgagtacacttgaagagcttaagaaggctgtcgagatgttcagtggttacgaactaaatggaagagtgttgactgttaataaggctgctccaaaaggagcacagcctgaacgcccaccacgcccaccacgttcctttagttctggtttaagagtctatgttggcaacttgccatgggaagttgacgatgctcggctggagcaaattttcagtgaacatggtaaggttgaggatgctcgggtggtctatgacagagagactggtcgatcacgtggttttggctttgtcacaatgtctagtgagactgatatgaatgatgcaattgctgcccttgatggtcagagtttggacgggagggctatcagagtgaatgttgcacaggataggcctagccgcagctctttttgagtggtaacttgagtgatcttccatgtccggctgattgagtttccttttaatggctaagtatacagtggcgttttttttttatcttctttggcagctggttccagattagatttgcatgttgtaatgttattaattttgtgtccagatgaaaatgattaaagttacaattccttttatagggattttaaagaaactctattgatttttttaaccattttgtttgctattgttgtacgaaaatgtagatattgtctcttagcttaaatcttctggtacattatctggctacttaaatgccacgtaagttcaaatgaaaataggggggaaaatgtgtttttagtctttataacttcagtcaaatatggtctaggtccttatattttcaaaaaaaaaaaaaaaa

SEQ ID NO: 8466 - DNA, 1941 bp, Glycine max
tttgttgtgttttttcttgatttaattgcctattaatgcatataaggaaaatatataacctccgaataatcctaatgcaactacaacgaaaaagtgattgactatttacagttgccgtgcttgcaaccacgccataaagccaaaaaatactaaagattgttgaaaatttagacaaggcagcaagaagatgatattcatgaaaataggctatatagaatgcgtaaacgatttagattcgtgaactgaaacaggaacttagaaaccacttcatatgaaacttgacccagttatttgatcacgttttcgtttatgatcctccggcagcggcagattatcaacttcattgttcacagatgcagttatcgaagaagtacacaagtctttgtccacagcaaaatggctatcgctagctggaatcaccagttccccatcttctattgaaatcaaattagactgctcctcaactgagacatcaccattgcttttcagttgttccttaacagaaagatcatcattgctttccttgagagattgatcgcttgaactggtcttttgatcttgtgttcccactagaaggtcttcaaggaaacgctcggtactacttctctgagaaatgaatttcacatccaatattgggttttcaaaatctacaacagaggaagcaagtgcaaatccaagaacattctctatgatgttctcatggaatgtttttctagggacctctgctgcaacagtaagttcagttcctgcagatggtccttcctcggtgatactatgacccaagggggtctgattgtcgagcaactcatctgaaatgtcacttttctgatcattgatttttccacttttgtcttcttcaaagctgtcaatacaaccagtgttcacacacgcctcatcttgatctccttctgcactgtaaagctggtcattttcttcagattcttgggcagtctttttcgagaatttatcattagaatctgggtctatcttctcactattttccaaagtataggatgaagccaacacttggatgtgactaaattcctcactctctgtgagatgaactgggtgggggggggcgccctcgctgctgctctcatggtcatcatcatcttcatttgaaaactcaggggctttaacacttaaacgtttggtatactctggagactctagagaaaaagaaaacaaaaaattagctaaagcagaacatatagcatcatcagttgactgctttcctttatctttcgaagagtttgtttcttgtcctgatgcatcaccttcttcatcctcaccatcaagaaactcaggagctgtaactacaagacctgggagcaattgagtagtattttctgaatcagacatgagagcagagacatatggtacctctgtgtgtaaatttttctcatctgattcattttccctggtgacagtataatcaggacaatcttcacaagagttggcatctgattcaatacaagaagcatcaagagcagaaattctaggacaagatggcaaagcagaagtctgaaatttcttagtcagagtatccagttgctgctcgacttgctgaagtcttgcctcaatgctgctcatgggcattaccattttctcttgaaagccaagacagatttcttctatcctgtccatgcgtgatagaagctgttccagggccctttcaacattgtcacccaaacaatcaccatgattgctctcaggaatagaaccttgtgacggaatagcactacaattacatttggttttagcaaattgaaagggaagagcagtatcgttgttctccatttcggcaatttttgagggtacaacactgaaagtgttgtccattttatcagtttgtgagggtactgcagcctgcttgctctctattctagcatcttctgagagtgcatctggctgggatggacccacccaacctcctctcgt

SEQ ID NO: 8467 - DNA, 2127 bp, Glycine max
tacggctgcgagaagacgacagaagggggagaggaatagcagcagcagcaagctatggcggaagaaccgaaagttccaccaccttccaatcctacgttgtcgtttgatcctagtcgaacggttggtattatcaagaggaaggccttgatcaaagacttagctgcggtataccatgccgaatgccttgcatactgtcaagagcttttggaacttcaaactaaatgggaagagccatatattgacttaaaaactccagaggaatcaaaaaaggagacagcacgaccctccaaacgtgtaaaaaagttgcgttaggttttcaggtggttgatgcataactcatttagggcgcaaaagatgcaccatctgaggatatacctttttcttgctgctggggtgtacctggttagtatcctaaatattaacttgatggagagaaaagtgacttttttcgcttgttttgtttattatgtggagaatgagtagagggtagagattcctgactcctgagttcagcatacaaatctgtacctatacaaaatttgagattcacgaccatttctcgcttcctacgatcgcttaataatacaacaaactcttcttacacagattataacaaggaaaagaactgctccatcgtaaaccaactacactttaaatggtctcccataggcttcatgatggagagaaaagaactgcatgacatctcataacctcagcatgcttcaagaggcattccattgtctaaacctgcatattccacgacgattttcagcaaatgagttgcgaatagactgcaacatagcacgcacagcaggaacatgaaccaattcctcatgctgctccacttctgcaagcctttcttctaaagacccagcatttgcatcaacacacatgaatatctttcgataagcagttctcatgctcttgatctgaaacattacccgagcaaattgtttagttgtgatgaaatataattgaggacaactaaatttgaaaattgtgagcataaacctctgcaatgctgaatccacatcgagtaaggcccactacatttagaccacgaagctcagctctttctccggctaccatcatgtactttgggacatcttgtgaaaccttcatttatgtaagaacatgacaatgtagttgcgcacctgagtagatgtaaatcaatttggcattgtaaaagtatttgttttaacaagttcttcaataagggcaatttgatgtaatacattccaaagatagcagcccttatgtgctagaatccatttttaaataaactttttgttgaaatcatctcatgaaaaataaatttacattgattgctgatgccaaagttgagaacagatccactattacataagtactgttatttacagtaattgatactgttggtcccgctcagaaatttaagtccctatcaaatttgcccaaatctaaaggatatgaagtgatcttaattgtgttggacagatttttaggttgcatattcttcacatactcctcaccattcacatccattataagtttagtacgacctactagaaaacttctgctgagtgctgactgcctatgattttgacagttgcatgtttccacaattgcataacaatcatttcccttgttatcaaacagattgattcaagaccatgaagataaaaagataaacctaccacagaaccaccaccaagaaaagagaaagagccaagatgacagaattgatgaacaacagtcgcacctgcagtgtgaacgtagtcttccacttcgacatgcccagctaggagagtattgttcgcaaaaatattgttgttaccaatcttgcaatcatgggcaatatgacaagatcccattataaaattggcattaccaataaccgtcctatcggttgattttgaagatcggtggattgaagtatgttccctaatatcattattgtgtccaacttccaggtaacattcatcctctggctacatgattagcacaattaaaagattatatttttttaacattaagcttttactatgattagttccttaacatgcactctgtcaattaagggaagaaaagaacctacttaactgtcaatatttctgcaatacatggggggggggcctacgtagctga

SEQ ID NO: 8468 - DNA, 1204 bp, Glycine max
  misc_feature (963)..(984): n is a, c, g, or t
cattaattttaattataagacacatatttgaaatacccattaggttgcttagaccaaagattgtttatgaaatctgcaaactgaaataccaagtgcttaatcatttggatcatgccttgaggaacattcataaatacaaaatagaagaactatacacaataaattttcaagagcaattgtctcaaatttcactttttttccctagtaaaaaaagatacaccaaaccacctaacatgccttcttcctttctagtgctacctccatccaaggtctttgaaacatcaattgtgttcttgcaaatctgactcgcttctccgattgaaagacttctctctgatggtgtccaagataggcttccacggacgcactcgacacgggcttggccctccatatggcatgccaatttgctcaaccacaccaccaagcctgccaggactccttgaaggtgaactccaaacattgcttgaaaaggaaccatctttgagggaagaagactttttgccctcaagcctcctgcttctagttttggctattgcagtgagcctcttagcaagggaagccaagtccacaggagaaacatcagcttgaaggattgagtatggtagcatgaagtacacattccctggttggagttgtgtgtctccattcaatggctttgagcaagaggaaagaagctgaactgaggtacaaacaaagtgctttggaggggtgcctgtgacttggctcactgaaattggattctcaaaatcctccacatagccactcagatgaaccaaacgaacattgttgattgtgaaggatggcttagaagaaaaacaacctcccatgtgtgcttttttctttgtaaatgatgcagcaatgaaagggtattgcaactaaggttgtattgtacttatgtgtgactatgttaattaactatatactatagaccactggggtttgattattgatgcgtggttggannnnnnnnnnnnnnnnnnnnnncataagcagcgttatagaaatgaaatggatggttttggttacctaagcagtgaattttctgactggctccttgagtttatctacttgtggattcaacttcaagtacacaaaagggtggctattaaataaaagtgcttctacttggaaacacaaagctgaagcctcatgtggccaataagggcatatttatacattttagtttaagggagaaattctgcag

SEQ ID NO: 8469 - DNA, 311 bp, Glycine max
aagaaaaccattcctttcaaattagtcgtatatactcaaaagatataaagatagtttataagagaagaaaataaaatttgtgtgagaaaaccattcctttcaaatttgaactttagcatatactatttgatgtcatcaacttttatatcaaaaaactatatttatgtgcacaaacattgctaaaaggaattcgtacttgctgtgaaaaaaaaataaaaaagcatggtcttaattaactatgtgttgtataactgttaaaaaataaacaaaaaatttctttttaaagggggcggccgttctagaggatccaa

SEQ ID NO: 8470 - DNA, 1528 bp, Glycine max
ctttggtgggtgatatacctcaaggcctaccaaagaaattgatgatggatgccaatttctttggtgggtgatatacctcaaggcctaccaaaattttctgttccaaaatcttttgagtatgcacagtccttaattccaactgctcttctcataactggtgtggctatattggaatcagtgggaattgcgaaggcattagcagcaaagaatgggtacgagttggattcaaatcaagagttgttcggtcttggtgtttccaatgttcttggttcatttttttcagcataccccacaacaggatccttttcaaggtcagctgtaaatcatgaaagtggtgcaaaatctggtgtatctgggattgtttcaggaattataatgacctgtgcacttttgtttctaacaccattatttgagtacatacctcagtgcacccttgctgccattgtgatctctgctgtgataggtctggtagattatgatgaggccatttttttgtggcgtgtagataagaaagattttcttctttggaccattactagcactacaacattgttccttggtattgagattggcgtccttgttggggttggggtttcacttgcgtttgtcattcatgagtcagcaaatccacatattgctgttttgggtcgtttgccagggacaactgtttataggaatgttaaacagtatcctgaagcatatacatacaatggaattgtaatcgttcgtgttgatgctccaatttattttgcaaacacaagttacatcaaggacaggttgcgtgaatatgaagttgatgttgatcgttctaaaagacgtggacctgaggttgaaagaatttatttcgtgattctagagatggcacctgtgacatacatagattctagtgctgttcaggctttgaaagacttgtatcaggagtacaaattacgggacattcagattgcaatatccaatccaagtccagaagttctgcttaccttgtctagatcgggtctggtggagttgataggcaaagaatggtactttgtgagagtacatgatgctgttcaagtttgcttgcaacatgttcaaagcttgaaaggagcatctaacagtccacaagcaccattctcttcagtagagaacaaaccaagtttgtttgcacgattatcaaaagagagagtggagaagctttcaattaccgacttggagtctggtaatggcaggcctccactccccgaggagagagattccaaattggagccattgttgtctaaagatcattgaagtctactttgtatcataaggtaaaaagtgtatttagccattctttcagaaaaaataaaatgaataggttaaagtttaaccgggtgtaatcaagccaacgttaaaaaatagcttgtgtaatatttgattggccggttgttgtaaaattaaatgaatttttaagaatggttttattatgtaaatctcctgttagctgtgtatccctaatacgaaaatcttgttaagttttaagttcatttcaaaaatagttacgggattg

SEQ ID NO: 8471 - DNA, 2368 bp, Glycine max
  misc_feature (2092)..(2096): n is a, c, g, or t
gatctaatctgataaaatagtaaggatacccacgcctccgttcccttggtatggtatttcatcatatgggtgtgtttaagttttcatctttcactggataaacatgaagaattaaccatgctctagtcaaaacttgttttgctcaagattcaataacttggtctgcttaaagatattggtttgatccctcacacctgcaaaattgaatggcaccctcaatttgttttcttcttctatcccttctgttcctttcatcctccacaagtggtgatgaagagggtttcatctctgtggtcatatctgataaggggcttgattttgccaaggatattctgatagaccaagctgttgcctctattgttcagtctcagctgccacagattgagaagactgtgcaagtccctcttgttggaaaagccaaagtggttctttctgacatcactatcaatgatatccaagttaattcttcatctgttaatactggagagacaggcattgctcttgtcgtttcaggtgccactgctgacttgagtttgaagtggaggtactctgttagcagttggttagttccaattggaatttcggacagtggaactgctactgtaaaggttaatgatttgcaagtgggacttactgtgaatttaaggaaccaagaaggaactcttaagttgattctgctggattctggatgtcatgttagagatttatctataaagttgcatggtggagcagcttggctttaccaagtgctagtagatgcttttgcaggaaatatagcatctgcagttgaagaggcaatttctaagaaaataaatgaggggatatcaactcttgaccttttattgcaatctcttccaaaaacaatcccattagacgaaactgctgctctaaatgtttctttcgtggacaatccagtgctgagtgattctgctattgaattagaaattaatggtttattcacagggagaaatgaagttttggtacctcaagcttaccgcagaggatcagacctttctgcttcctgtggtgacagttcaccaaagatgataacaatttcattacacgaaagtgttttcaaatccggttccttggtttatttcactgctgatagtatgcaatggattgttgatgaactccctgatcaggcccttttgaacactgctgaatggagattccttattccacaattatacaaaaaatatccaaatgacgacatgaatcttaatatgtctgtatcttctccaccagatatacaagtgacaaacaaagatgtcggtgtcaacattttcatagacataacaattgatgttctggaagatggtgaagtcatacctgttgcatgcatctcggtggattttagtgcctcttgtgctgtggaaatcgtaggaaacaatcttgccggttggcttaaattgagaaagttttccacgtacttgaaatggagtaaaatagggaaactgcacatgaatttgattcagtcagtgacatcaaccgtcctcaagactgtcctcataccatacctaaactcgcagttattgagaggaattccactgccaattcttaatggtttttccattaagaatgctcgtatattgtatgctcccccatggattactgtgtgtagtgatgtttctttctcaagagactactatctccaacaactaccagcttatgtatcataaacatgctctcagagatctgtctgcttagtgtactaagtggtaataaggtaatgagcaacttgtcaagatggctatgaagagtgaatgacatgaacattggtgtagctctggattttacctattgtaaatcatgctgtcctgaagattacatggaaaaactgccaatagtcaaacgtccttatttgatttggaatgctctgcagtttttttaatcagggaatggtatttttatatgtaaatttgtgaaaataatatattaacttttgtttggatacatcatacatagattaatatttttgttttcccaagtattaacaaaaactattttttaaaatagaaacatttatttcttcactactatccaatgagcgaaacaactataataacaatgtgttggagcatagatacannnnncttttatagaccacatgtatatttacagaaaacaatcttgttccagcttaataagaaatgcatcttagcatacactttatatttacgatttcatattttgtatggcatcgtagattaggtgtcttagcatgtgtgatgccattgtttgctctggattatctttgatatccaagtctgttggcttagaactccaaaactttacttttgagttatgttatatgcaatctcaaaccaataagaattttaggtctcaaattctccaaagaatatac

SEQ ID NO: 8472 - DNA, 1178 bp, Glycine max
tcggctgcgagaagacgacccccccccggattggattcgaggataattattatcgtaaagaatattaaaaagcggaagaaagcagaacagagcatagcagagcagagagggaggtggaaaaagaaaaaaaggtgaggaagaaatcgaggaaaaggaagagaagaagaaggaatgagtgccacagtgactctaactctaaacctatgtcgttcttccatcgttgcttcttgtccacattataaccacaaaccaaaccctaatttcaatgccttgtttagcttctctttgtccctgtctctgtctcaccacagacgcatcgctatctgcaagaaaccattttcctcaagacggacgtggcttcatggacatatgaaaagagatcgagattatgaattggagaatgggttagccttatttggttctgatgaagaactagcgactcaaattccaactcaggcccaatcacttgttgaaggatcaggatccattcgcgtagcggagttcaagcctgttcctgatgttgattatctgcaggagttattggccattcaacagcaaggacctagagctattggcttttttggaactcggaacatgggattcatgcaccaagaactaattgagattcttagctatgctatggttataactaaaaatcatatatacacatctggagcatctgggactaatgctgctgttatccgaggtgctttaagggcagagaaaccggagttgcttactgttatattacctcaaagtttaagaaaacagcctccagagagtcaggagctattgtccaaaccatgtactttcaagtttcaacagaaagcatgggagcctctttgtaacctccaaaactacaggtgaaaaatgtcatagaaaagccccataatgatcatctacctctaatagaagccagcaggctatgtaatatggatatcatttcgcacgtgcagcaagtcatttgctttgctttccatgatagtcggttgctcatggaaacttgtcaagaagcaaaaaatttgcggaagattgtgactcttttctacctcgactgacaatttttatccaggtctatacattattcctctgcataagagtgggctgggagagagtggtgcttatttttggtttgtaattaataatcaatgatattgctttaaattgcttatttaagt

SEQ ID NO: 8473 - DNA, 1121 bp, Glycine max
  misc_feature (6)..(7): n is a, c, g, or t
  misc_feature (45)..(46): n is a, c, g, or t
cgcggnntggcggccccgctcttttagaactagttgtgtatcccnnaccgggcggccccgaggaagcgaaaaatatatttgggcaatgcaaagcctaacactggtcctctcatagtcatgaatctatcataactcttcctttccttttatcgtttcatccagaaaacatggatgccatgacactgtcactcccgctccctccggttccggtctgtacagtgcccgcgtctgcatcaacctcgtcctctgtttctctcactcactcctggtcggccacggccaggcagaggctctcctctcacagaacaagacccattttccggaattattcctctgcggttccaaaacttacagtggtgacatgcggtgcggctgtgacggagatcaacgagacccaattcaaagacacggttctgaaggctaaccgtccggttcttgttgagttcgtcgctacttggtgcggtccttgccgtctcatctccccctctatggaatccctcgctaaggaatatgaagacagattaacggttgtaaagattgatcatgatgccaacccacggctaattgaagagtataaagtttatggactaccaacattaatactcttcaagaacgggcaagaagttccagaaagcagaagggaaggtgcaattacaaaagtgaaacttaaagagtacgtggatgctctattggaatcgatatcagtttcatagtcatcatattcatatatgtttcaaagttctgacctgttctgggagacttgagatataggagcatatctgtttgtttccatatccttgtattgtatgaaacagtttaacaggcttatacagttgtataatctatataatttctgaagctgtaaatacagcataatgtggtgaaggaaggttgtgcttaaaaaagtctacacggggttggaactcattcattttaaatccaaaaataaaatttgatcgagtcaaatatgaagaaaaataaaataaaaattgaaaaaagataagtatttggcaggataattgggttccaaactgtggtggccttgttgattgcttaattgaggaggttggtagtatttctttggacataaaggtgttgaattcagtcagagactttattcc

SEQ ID NO: 8474 - DNA, 1567 bp, Glycine max
  misc_feature (18)..(18): n is a, c, g, or t
ctcaggacgttgttaaancgacgcccagggaattgtaattcgactccctataggggcgaattgggttccgggcccccccgtcgagttctcctcattcgagtgaccccctacccccccccgcggcatcatcacagacatggggtctctgcctctgcaattcagcgggctcaagtgctccccactctcatcttcttctctcttctccaaaccttctctttggacccaacaatcccaaaagcgcgtttcaattaccattgcgaactcaatagcaatagccaatgcgcagaacaaagagagagcgaggcttaagaaactcttcgaagaagcctacgagagatgccgcaatgctccaatggaaggtgtttccttcaccatcgaagacttcactgctgctcttgacaagtacgacttcgattctgaagttggcggcaagattaaaggcactgtgttctacacagataacaatggagcagttgttgatatcactgcaaagtcttcggcatatttgccactgcaagaggcgtgcatccacagggttaagcatgttgaagaagcaggcttagttcctgggttcaaagaggagtttttgatcattggtgagaactcaatagatgatagcttggtcttgagtttaaggtctcttcagtttgaccttgcatgggaacgttgtagacagcttcaagctgaagatgtcacagtcaagggtaagattgtgggggtgaacaaaggtggagtggtggctgagttggaagggcttagagggtttgttccattgtctcaaatatcaacgaactcaaatgtagaagagcttcttgataaggagcttcctcttaagtttgtggaggtggatgaggaacaatctagacttgtcctcagcaaccgcaaggccgtagctggcaaccaggcacagctaggaattggatcagtggtcactggctctgttcaaagcctgaagccatatggtgctttcattgacattggtggaattaatggcctccttcacgttagtcagatcagtcatgaccgtgtaactgatatttcaactgtgcttcaacctggtgacatattaaaggtgatgatcttaagccatgaccgagagagaggtcgagtaagtctttccactaagaagttagagcccacacctggagacatgattcgcaatccaaagcttgtctttgagaaggcggaggagatggctcagacattcagacagagaatagcccaagcagaagctatggctcgtgcagacatgctaaggttccagcctgagagtggattgactatcagcggtgatgggatcctgggaccatttacttcagacttgcctgaagagggactggatttgagtgaggtaccaccagctgaagaatcatgattcagaattgcgtgctcttttctttctgtttgcttacatttttataatattgtttgtaactaactatcaattgttgccgaacgatgtcttgatgccaatgtattattgtgagttaaataaatagaactaattcatattatcaaaaaaaaaaaaaaaaaaactcgagactagttctctctctctccctcgtgc

SEQ ID NO: 8475 - DNA, 1055 bp, Glycine max
gaaacttgccatgtggcaagagctcaacttattgtcattaagaaaagtataagggcttttagtgggaacaagaatcagataaggctgacctaattgtggggttttacccaagaatgtaaatctcaaagcatatatgcattaggagtataaacaagttgagctgtgctgatcacttgaagctcaaggttggcttgcataaaaatatggtgctcaagaaatcagctggagaagaacttcttgagcatgtgattccttttaagtttgtagaggtggatgaggaacagtctagacttgttctcagtcaccgcaaaagctgtggctgagagccaaggacagctaggaattggatcagtagtcactggctctgttcaaagcataaaaccatatggtgccttcattgacattggtggaatcagtggcctccttcatgtcagtcagatcagtcatgaccgtataactgatattgaaactgttcttcaacctggtgatattctgaaggtgatgatcttaagtcatgaccgagagagaggaagggtaagtctttccacaaagaagttggaacccacacctggtgacatgattcgcaatccaaagcttgtctttgagaaggcggaggagatggctcagacattcagacagagaattgctcaagcagaagctatggctcgtgctgatatgcttagattccagccagagagtggattaactctcagcggtgaaggaatcttaggaccactaacttcagacttgcctccagagggagtggatctgagtgaggttcccccagctgaagattcgtgattgagagaattgagaaccgagtcctcttttcctcccctcccccccttttttttctttcttttatctattttttctttttacaccttactccaaatattgttgtagaaagatgaactaatgtagcggttctttttagcaactcagttttgtagtaaaggcaattgtataactctttattttctgtccaaattattgtgagaggttgtccctgttaaaaaaaaaaaaaaaaaaaaaaaaaaaaaaaaaaaaaaaaa

SEQ ID NO: 8476 - DNA, 1607 bp, Glycine max
ttacggctgcgagaagacgacagaatttcgataatttcacaccttatctatctaatactatactatacaaaaagttctcagtgacagagtagagtaacggaggcatgccgatgacgatggcgatgacggcgtcgcagttgcggtgggggtggagaccgacgccgaagcagcagcaacgacgccgtatggttccggtggtgtgttccatcgctataaagaacgctcagaacaaagagagagcgaaactgaagaagctcttcgaagaagcgtacgagaggtgccgcactgctcccaccgaaggcgtttccttcactatccaacaattcaccgacgctctcgacaagtacgacttcgacgccgaaatgggcaccaaggttaagggcactgtttttgccacagataacagcggagcttatgttgacattactgctaagtccacggcctacttgcctctgcatgaggcttgcatccacagaattaagaatgtggaagaagcaggcataattcctggcatgagagaggaatttatgatcattgatgagaatcaagcggatgataccttgatcttgagtttgaggtctatccaatatgacattgcgtgggaacgctgtagacaacttaaggctgaagatgctgttgtcaagggtaaggttgttaatgcaaacaaaggaggtctggtggctcaagtggaaggccttaaggggtttgttccattttcacagatatcatcgaaatcagctggagaagaacttcttgagcatgtgattccttttaagtttgtagaggtggatgaggaacagtctagacttgttctcagtcaccgcaaagctgtggctgagagccaaggacagctaggaattggatcagtagtcactggctctgttcaaagcataaaaccatatggtgccttcattgacattggtggaatcagtggcctccttcatgtcagtcagatcagtcatgaccgtataactgatattgaaactgttcttcaacctggtgatattctgaaggtgatgatcttaagtcatgaccgagagagaggaagggtaagtctttccacaaagaagttggaacccacgcctggtgacatgattcgcaatccaaagcttgtctttgagaaggcggaggagatggctcagacattcagacagagaattgctcaagcagaagctatggctcgtgctgatatgcttagattccagccagagagtggattaactctcagtggtgaaggaatcttaggaccactagcttcagacttgcctccagagggagtggatctgagtgaggtacccccagctgaagattcatgattgagaattgagaattgagaactgagccctcttttacttccctcccctttttatttattttttctttctttttacaccttgctccaaatattgttgtagaaagatgaactaatgtaacggttctttttaggaaactcagttttgtagtaaaggcaattgtagaacacatcattttctgtcgaaattttattgtgagaggttgtccctgttatctttagtcaaattgacaatagtggaaccagttcaaaccccagatttacatattaaaaaaaaaaaaaaccaaaaccaaag

SEQ ID NO: 8477 - DNA, 1320 bp, Glycine max
aaaacaccttgatttctctgtaagccttgctttcaattttctccttacaaaaaaatcctttcccttctctagtccccataactagcaaaagaagccaatagaaaactgttccatatagtttcccattcaaacttgttttgattttcattttaactcaatggagaatagaacaagctctgtactcccacctggcttcaggtttcaccccactgatgaggaactaattgtgtactacctttgcaaccaagcctcatcaaggccatgccctgcatcaatcattccagaagtggatatctataagtttgatccatgggaattacctgataaaacagactttggagaaaaggagtggtacttctttagcccacgagagaggaagtatccaaatggggtgaggcctaatagagcaaccgtgtctgggtattggaaggccactgggacagataaagcaatctatagtgggtctaagcatgtaggggtgaagaaggctttggttttttacaagggtaagccaccaaagggtctcaagacagattggattatgcatgagtatagattaattggatcaagaagacaagccaatagacaagttggatccatgaggctagacgactgggtcttgtgtaggatctacaagaagaagaacattggaaagtcaatggaggcaaaagaggaatacccaatagcccaaatcaatcttacaccagcaaacaatgacagtgaacaagaaatggtgaaatttccaaggactagttcccttactcatcttttggaaatggattacttgggtccaatatcacatatattatctgatgccacatacaattcaacctttgattttcaaattaacactgccaatggtggaatagacccgttcgtaaaaccacagccggttgaaatcccttatgcagcagattcagggaagtaccaagtgaaacaaaatagcaccatcaaccccaccatatttgtgaaccaagtgtattatcaaagaggataatgccaaaaaaaatattaaaaaaaatgaaattggattatttggacatgacgataagcgtcaccaattaaataatcctgaagattctttgtaaatatatatatatatatatatatatatataaatataagaattttcagtgatatccaatcagatagctcccatagaaattgtatatatatatatactctttgtaagaaataccattcattaagtaacacttttctcaacacttttttttatattatttagtaaaattgcacatgagtcccattattaagagtaatcaggttattcaataaaaaatctaattattgtgaaaaaaa

SEQ ID NO: 8478 - DNA, 2403 bp, Glycine max
gcgggaagacgtcagcgccgcgggccccccccccgatgcatcgcgtttctctctcttagttcaaatttcgaattcggaagcagcaaaactaaagcccaaaaacccataccaagatgctcctccgaagccactgttgctacctcggcataatcgccgggctagcagtgttcctcgcaacgacgtcgttcgccgacgcgcaatcctgcaacggcatcctcgtctcatacgcctacaccggcggcctgcggttgccgcccaacgtctccgactcggctaagcagccgtaccggttcgagtcgacggtgacggttctcaacaacggcctcgacgagctcaagtcgtggaaggtcttcgttgggttcgaccacgacgagttgttggtctccgcctccaatgctgtgctcgccgacggcaccaccctccccgccgccgtcggaaacggcaccgtcttcgccggtttccccatgactgatctcaagaccgccgtcgaaaccgccggcgacttgacccagatgcaggctcagatcgaactcgtcggcaccgtgttcggggtggcgccgcccagtgttccgatgccgaaatccatcaacctcgccaatgatggtttcctctgtcgcaaatccaccgctcaagggaagaatgcgagtagtgtgtgttgcacgagagatcccaagttcaaaactaacattactacggatgaagagtttctgccacgtcagagtggtgatcttaccattatgtatgatgtgatcagaacttatgattcaaattactgggctgaggttaccgttgcaaaccataacccacttgggaggcttgataactggaggttgagctgggactggatgaatgatgagtttatatattcaatgaaaggggcttatccttcggttgtggatgcttctgattgtctctttggtaagcaaggaactttctatagggatcttgactttgcccttgtgttgaattgtgagagaaggccaaccataattgatctccctcccaccaagttcaatgattccgaccttgggaagattcccttttgttgccggaatggtactattttgcctccgtccatggatcctagcatgtctgcttcgagattccaaatgcaggtcttcaagatgccgccggcgcttaaccgatcccagctttcgccaccgcagaactggaagataagtggcacactcaaccctgactatgaatgtggccctccagtaagagtgagtcctaccgaaaatcctgacccgtccggcttaccttcaaacaaaactgtgatggccagttggcaggttgtgtgcaacataacaacagccaagagaacatcaagtaaatgctgtgtctcgttttcatcttattacaatgattcagttattccatgcaaaacatgtgcttgtggatgccccaagaacacagagagaacatgtagtactagtgctccagctatgtggcttccaccagaggcacttcttgttccctttgtgaaccgaactgccaaggctgttgcttgggcaagtctgaaacatctccgggtgccaaacccattgccgtgtagcgataactgtggtgtgagcatcaattggcatttgtacacagactacactaaaggatggagtgcaagggtgacactttttaactggggtgacactaattttgcagactggtttgccgcagtacaaatggacaaagcagcttcgggttttgagaaaatgtattcattcaatgcaactcttctagatggtgtaaacaatacaataatcatgcaaggtttgccaggattgaactaccttgtagcagaagcagatggagctgaccctttgagagatcctagggtgcctggtaaacaacaatcagttatctcatttacaaagaaaactactcctggaatcaacgtagctcgtggagatgggtttcccactaaggtatttttcaatggcgaagaatgttctcttccttcagtgtatccaagcagtagtggtttcaggaatggtttttcattggctacttccttgcttctaacactgttgatgatcctcttgatgcggtaatagtggctactgagtcccgagacacgatttgattcatatattgacctcaccacagaaactcagtggacttaatcgtgctgttgtaacattcatgcgtgtgtctgtctggtttggatgctgtggcattcattgttcaattatacgtgattcttttgagcttgttatagtacagaagattgtagatttatgttagatgatagaaatatattcctttttatgttaaaagtttatttttttttttctttgtttctgttgtttgaaaaattacaatgatggatcgcctatattttatactatgctggttgggcagtataagaattcaatggtcttacagttccagctgatgggccatggg

SEQ ID NO: 8479 - DNA, 972 bp, Glycine max
aacttctaatcttctcccagaagaacagccgttacttctgatcagttatacggctgcgagaagacgccagaagggggacgaaaaatggaccgcaggcgaaaatacccaacactatttactacaaccaacggacaagcttcgttctggcgaagaatggcggcgccgggctcatccgccggcggcggcggagggacggcgaaggctacggtggcggagcagatctcgcaggcggtgcagtccacctccaacctcctccaccttatgcggcactcttctcctgcccaggctcaactggttaagcttcctaagaatcttttggcaaaggtttccaccatcaagaatacagagcaggttttggagcagttgcctggggtgatatcatctcttgacgcacacatggaaaatgggttgcaaaatgttccacatctaaagaccgtggttcaggtactttcaaatatggaaagtagccagcttagcttgctatcccgaccccatcctctccagaaggaacttgaaccaggaaaccaatctcaaggaaccggttaaagaatctcatgttgctttaggagtttcacccgtgatcaattcatgcagattttggaaggtttggaactgtgacttgttgtgtttccttcttgcagtcttcctgcaaatcaaataacaataccatcctctgataaagtgcatggttattcaactgagaaacctgttaaatattagtgacaattgggaatcttgtccaaagaattcaaggctaggctattaattgattgatggcaattgggtatctgtattctgtaatgtatgtccattcattttcagcttgtgcatttttgtttttcatcttgccaaatgttatgttcaaagtgatgtaacttttatttaaatcagttttgttttactagctaaggaatgactcaaagctgagtaaaaaccacttactcctatgatggcacttctactccccaaggc

SEQ ID NO: 8480 - DNA, 1980 bp, Glycine max
acttatcacttataatttgataagctaacttttcacctaattttacaaaacctaaccaaagaaatacctttatctaaatctaaacttggccctcaccattttataagcaccacttcctcctcagtcctcacccactcactcactctacattttagcaccattcggctggcccaacttacattgtaccttatccgaatggtcccaaacgttacaattgcaaataaaaataaaaacaaattatccctttcccttactccaccgttacaaattctgaaaattaaaaacaaatattaaattaaattaaaagtaagcacgagattcttctgttctacgtataccacgcacgcttttccactattagcagctatcagcagagaatccaacgagcgagttcgcgatatcgaaaccgacacgtgtcccctgctgctgcacgttccccatgattgaaagcgacgacgtcgtgggcgcaaacgcgaagcagaacgtccccaccgagtcaaccggtatcaggtaattcctcgctggtaacggtaactccctcccttcgggaaaatgaaacgacaccgtcggaacctgcacactctccctcgatgacaagtcgtagcatgtatcaaacaacgacacgccgttcgccttcggaatccccttcgcccccttcacaaacgcgtcgcggagcgcgtcgtaaacctcactcctaagccgcgtcaccgccgtgccggaatcgataataatccctccgccgccgatggcgtcaacctcaaaaatcgattccggaatcggaagagcttctccgccaacgctgattcctttcaatccgagataataaaacgtgtcgagctcgggattccgccttaacggcgcagtaacgacgtttcgaggcaacggagagttgaactccagagttgaaacggcgtcggagtcgcggttcacgaggcagtaagaaaacgacgtcgcgttgacctgtgctggaaaagagagctttccgccgccgcgcccgcccaaaccggcggcgccgacgaacagtccttcgttgttgtggccgcatccgatggctacgttctccaccgccgccgtgccgagcgtcaccgtctccgtggcgaactctccgacggtgtatgatccgtcgccataggagacttcgtagaggcacgtgccgttgcggcactcggagaggtccagggacttacactgcggcgcgtcgcagcggatcggagagtacgaattcgacgaaactgggtcgaaaattggatccgattgttggtagcattcggagcacggcgcgcattggatccagctcacgtcgcttcccgtgtcgagcaccacgtaggcctgactcggtggctttccgattccgactcggaggaagtactcgccgcttccctgactcgttcccgacacaacaggaccttgtagcgcgttggcttcgaactcggcgtttgactcggccgggtggagatccgagttcgagacgcgtttcagaacgagatccaggcgagtttgtaaagatttgactcgggctgagtcgcgagcgagtcgagataaggttagcgatttgtagtctctgtgggagggtttctgaattgaggctcgggaacgtaagtgaataccaaacgacgacgatagaagcaaggcttcttgttgtcgttggtgttggttaaggtgatggggggtgaaggcaacggcattgtgtgcgttttggagggaggaaacgacgtcgaggagtgtcgttttggaggagtgtggtgtgcttcgggagtgtgttaaggcaaagaggaggaaaagtgggaagaagagataagtgagaggtgccattagatagtagtgaatgtgtgaagttatggtaaatagggttagggttttgggggttttattttgggatgagaagggttcacgtcaagattattggattttaacaaagaaagaggaagctttggatgatttgttgggaaagcttcgttttggcattgtatgttgttaaac

SEQ ID NO: 8481 - DNA, 2597 bp, Glycine max
aagggaacctcgatcccatgccatgtgcggatggggcattattatttcactttgtaaatagtaagtgtgtctctcaaacaaagatgagatctttggtgttggatttttgacgaatgaaataatagtattatggagaagaagaaggaagaaggagggaaagtggggctgagaaagaagccatgtgggtgtgtgtgatttttttagttctctctgacaccaccccatctaatcttaacacacaatgagagcacaacatggaagaaaagcacttgagatagatctaaacatggaacatgaaacatgagagagtgagtggtgttgtttttgtgtgatgcagttgttttagatcttgttgagaatgatgagtggtaggaatgtgagagagtctctattgggatccctcaaccatcaccgtagagggcatagttttaatggggtggccaacaacaaccaccaccacgatgacaacctcgatcttttctccgactcccctccctcccccccccccgctgcttcttctgatgactcttcagatgtttgggtgaaactggggaggctctcaattggaacagcaaaaccggttaaaagtggaattgatgatctgttatcatctacagaaggagggaagcatgattatgactggcttctcactcccccggggacccctgtttttccatcagaaggagaatcccaaacaaccttagctcctccaaggagaagtttgactagatcaacatctacctctaagacctcaaggcttgcagtctcacaatcagagaacaacaatcccgcctctagaccagcaagaagcaggtcagtaactcgctcttccatctcaacttcacactcacagtacagctcctattcttcaaacaggcactcatcttcaatcctcaacacaagttcagcctcagtttcatcttacattagaccatcttcccccataactcgctcttcatcttcagcaaggccttccactccctcctctcgccccacagcatcgcggtcctcaacaccctccaaaccgcgtccagtttccaccagctccactgctgaaaggaatagaccatcatcacaaggctcaagaccttccactcctagttctaggcctcacattcctgcgaacttgcattctccatctgcttcatcaactcgatcactgtctcggccttctactcccacacgtaggagctcaatgccatctttatctccgtcaccttcccctacgacaggttctttaacttcagcaggccgtgtttcatcgaatggacgcagttcagcacctgcatcaaggccaagctcaccaagcccgcgagttaggcctccacctcagccaattgttccacctgatttcccacttgaaacaccaccaaacctgagaacaacattgcctgataggccggtttctgcaggccggtcccgccctggccccccccccatgaagacaaatagttctgaaactcaagcctccccagttactatgccaaggagacattcatctcctattgttagtagggggagagtgacagaacctgcagcaaaaacccgtggctattccaatggccatcatgttgatgctcctgagcctagaaaagtctcacatgctcctgaggttgctgcaaggaaatctgttaggtcctcatctactgcccctgacaacactggatttgggaggactatctcaaagaaatccttggatatggctattaagcacatggatataaggaacagctcaggaaatattcgttcactaacaagcaccacactctttcctcagagtattagaacttccactaccaagtctcatcgagtttcaagtgctccagcatctgttgacatgaatggaagcatgataagcagtaaaaatggagccaattttgatgtgggaaatggtattgataggaatatgatgatgaaaggaagagatgcagatgaaagacattattctgcaaaactgagtgaagtggacatctatgagagttctcgttacgatgcactgttgtttaaagaagatttgaagaacacaaactggctgcatggtgctgatgataagtgtgatcaaggccccatatttgataatggatttgagcaccttcctgaaccttttggcctcttataacaatatctatagatgttctgcctagtgcatttgtaacatgctattttatgttctaattattatctcaattttttgaaaggatgggatgtttcaacttatatagctccaaggtaaagaagtgaagatgcattcatatgttttctgcaatctgctgagaaatcagtgaattcaactttgatcttaaacctatacaaacaatgcaggaaaaaattacatgacagaggtcccactttctttgggagaatgagaattttcataaatgagtgagttgcatcccatgtatgcgtttgtcaaaaggcaaatgtactgtgagtacatagagatgaacgggatgtgatgtcatatgcaaacactatggttgagtgttatttcccacttggcaatgaacactatagttgagttgagttgtatttctacatttttgtgctctttacttaacccatatacaatagtcaaattttgataaattctttaaaaa

SEQ ID NO: 8482 - DNA, 2756 bp, Glycine max
tctttttaatacaagatataagagttcaaatccaccgttcacttccctcgagccgctcgagccgtgactctggaagggaaggatgcactgtgaccactcttaccataactgcagaaccaaagaattggcaaaatgcaattagagttgctgttcaagaggttcggagacttaaagagtttggggttacccagggtgaattaactcgttatttagatgcccttctgaaagatagtgaacacctagcagccatgattgataatgtatcttctgttgataacttggattttatcatggaaagtgatgctcttggacataaagttatggaccagaggcaagggcatgaaagtttacttgctgttgctgggacagttacccttgaggaggtcaattctgttggtgccaaggtgttagaatttatagctgattttgcaaagcctactgcaccacttcctgcagcaattgttgcttgtgttccaaaaaaagttcacaatgagggagctggtgaaacagaattcaagatatcatcaactgaaattacggatgctatcaaagctggattggatgaacctattcagccagagcctgagcttgaggtgccaaaagagctaatacaatcaacaaagctagaagagttgaaaaagctgcgcaagccggcctttattcctgtaaatcctgaaacagatgctacaaagcttcatgatgaggaaactgggatcacccggcgccgtctcgctaatggaattcctgttaattataagatatcaaaaactgaaacacaaagcggtgtgatgcggctgattgttggtggtggacgagcagctgagagtcctgagtcaagaggatctgtgattgtgggtgttaggacactaagtgagggaggtcgtgttggcaacttctcaagggagcaggtggaacttttctgtgtaaatcacctgataaattgctccttggaatctacagaggaattcatatctatggagttccgttttactttaagagacaatgggatgcgtgcagcctttcaattgcttcacatggtgcttgagcatagtgtctgggttgatgatgctttcgatagagcaaggcaattgtatctgtcatattaccggtccatccccaagagcttggaacgctcaactgctcacaaactcatggtagcgatccggcacggaggcgcccccccccttgagcctacaccaaaatcactggaaaatttaaccctgcaatctgttaaggatgcagtgatgaatcaattttttggtgataacatggaggtatgcattgtaggtgactttactgaggaggacattgaatcttgcattcttgattaccttggcacagctcaggccgcaagaaatcacgaaagagagaaagaattcaacccacccttatttcgaccatctccatctgatttgcagtttcaagaagtatttttaaaggacactgatgagagggcatgtgcttatatagccggaccagcgccaaaccgttggggttttaccgttgatggagtagacttgttagagtcaattaataatgcatcaacaatcaatgatgatcagtcaaaatctaatgcacaacagacacaaggtttgcagaagagcctttgtggtcatcctcttttctttggtataacaatgggactgctttctgagatcataaattctaggctcttcacatctgtcagagattctctggggttaacatatgacgtgtcatttgaattaaacttgtttgataggcttaaactaggatggtatgtgatctctgtgacatcaactccaagcaaggtccacaaagctgttgatgcatgcaagaatgttcttagaggcctgcatagcaacaaaattactgagagggagttggacagggctaaacggacccttcttatgagacatgaagctgaaattaagtcaaatgcctactggttaggattattagctcatttacaagcttcttctgttccaaggaaggacatatcatgtatcaaggatctaacatttctatatgaagttgctactattgaggatatatatcttgcatatgaacagttgaaagtggatgagaattctctatattcatgcattggaattgctggtgctcagactgcacaagatatagcagctcctttagaagaggaagtagcagatgatgtttatccaggtgttattccggtgggacgaggtttatctacaatgacacggccaacaacctgatatttttggactaagttttggcctgcttgctttaagatcgggaggagccatgtctggaagtttgattacaagttgtcgttcaaaggattagcggcatgtgtgtcacaacacaagaagttgctgcattcatttaacattcaaaccactcggtatacaagctgtttgatcaaacctaagaagcggttcttgacttgcgagtgattgatttcctcagttatccttatcttcagttgaatcacgctaataaaatgctgttactacctatacttttgtagaattagaataaagaaaaaatgtagaatcaatcactaagatgtataggtgccattttttgtctgtcggccataaatttttttcgggggaacgccgaccatagcgtaggaaaaattagttatataaattgtaaatcattgtttccgcgcatataaaccaagtcttttcttcatcccatccaaaagggaaatgataatttttcatgctttcctaaattgaaagctagactattttcatttgaaaattttaattatttaaaaaaaaaaa

SEQ ID NO: 8483 - DNA, 1238 bp, Glycine max
cttctgctttttccctataaatcactccccttagaacatcctaatcgctctcttcgggttctcgtcaaaacgcaaagatgcaagttccattgatcgacatcgacagaatcaacgatctccaagtgggtctgaactctctgcagaacccatccttcccaatcccttctcagatcacaacctccctcgcttacaatttctgcaaatggggcgcagtcattctcgcccttgtcgccaccttcggcagcatcatcaacagagtcactatcttcatcatccgcttccgcgccaaagccccttctctcccatccctaaccctaaacgacgacaatttttacacctcctcctcctctgacgacgacgacgacgacgataacgacgacgacctaacctactcctcttccgagcccgaagacgagccctccgcgtcttccagtttcatccgtttggacgactatttccgactcagaggaaccgataataataataataataacctagacgacgagtttcagactcaaaacggcacgcacaaacgatgtcgtagcatcggggatattttctccctctcggaactagccaacagcaagagcgtggtgaagctctgggacaccataggcttcggcctgggcttggacttcgatgattacgatggttactacgttggtaacgcggcggttccgacgagctccaccgcgtctccctcggtggttgtctcggcgggggaaggcgcgtgcgggaatctggcgctggagatctgggacacgcggctgcggcggcggaagcccacggtggtggcggagtggggtcccaccgtgggaaagaccctgcgcgtggaatctggtggcgtccagaaggtctacgtcagagatgacgggcgttacggcgtgacggtcggggatatgagaaaggtcagcacgccgttagagagcgtaacggaatctgacgcggatacttggtgggatgcggacgctattgttgtttcggacgagtcttttggcgaacagcaatcaatgttgcaacaaccaacttgaataataattgcagttcctttttcggtgctggaaatataattataataatcgaaaaaaaaataaggcgccaccatccgagattttctcaagagaaattgtttatttgtattattattcaatttaaaatttatacattgtatattcatcaaaaaaaaaaaaaaaaaagcttatcgataccgtcgacctcgagggggggcccggtaccca

SEQ ID NO: 8484 - DNA, 1224 bp, Glycine max
aaattgtgtaaaaaaaatatataattagtcaagcggacattcctaaaaaatatcattacaaatacgtcaccgtatttgtcccgtttccacgcgattttgattcaaaagaaaagaagcaccaagcgaagccagcgaagctgtctttcgattccttcgtgcgtgcgattctcctgatatccaaggtgaagcaccgacaccggacctatctccggcgaatccccagtccccactttcttccttcgaaatgaatcccgagtatgattatctgttcaagctccttcttattggagactctggtgttggtaaatcatgccttcttctgagatttgctgatgattcgtacatcgaaagctacataagcaccattggagttgattttaaaatacgtaccgttgagcaagatggaaagaccattaaactacagatttgggacacagctgggcaagaacgatttaggacaatcaccagtagctactaccgtggtgcccatgggatcattattgtttatgatgtgacagatgaagagagcttcaataatgtgaagcagtggctcagtgaaattgatcgctatgcaagtgataatgttaacaagcttttggttggcaacaagtgtgatctggaagcaaatagagcagtgtccaatattgaaacagctgatctggaagcaaatagagcagtgtccaatattgaaacagctaaggcatttgcagatggaataggcataccttttatggaaacaagtgcaaaagatgctacaaatgtcgaacaggctttcatggcaatgactgcttcaatcaaggatagaatggcaagccaacctgcaaataatgcaaggcctccaacagtgcagatcaggggtcagccagttgcacagaaaggtgggtgctgctcttcctgaccacagttactcagatccattttatttggtcacctttttcatgtaagattttttttattattatatttcgctaaatagtggaccagtgtcagaatttgtctgttggtttggaactgacctagatgatcccattctttgaatatacttaatgatgtggcttgtgcaaagtataatactcatcaatgctaaatacatattcctattcatatcttttcatatgggacttagaaaaaaaaaaaatttaaaaaaaaaaacctttggaagaaaaaaaaaaaaaaaaaaaccaaagaaacaaaagataaaaccaaaaataaagtccacctcgg

SEQ ID NO: 8485 - DNA, 1077 bp, Glycine max
aaattgtgtaaaaaaaatatataattagtcaagcggacattcctaaaaaaaatcattacaaatacgtcaccgcgcgtcccccctcgcctcccccctcgcgtccaaaagaaaagaagcaccaagcgaagccagcgaagctgtctttcgattccttcgtgcgtgcgattctcctgatatccaaggtgaagcaccgacaccggacctatctccggcgaatccccagtccccactttcttccttcgaaatgaatcccgagtatgattatctgttcaagctccttcttattggagactctggtgttggtaaatcatgccttcttctgagattttctgatgattcgtacatcgaaagctacataagcaccattggagttgattttaaaatacgtaccgttgagcaagatggaaagaccattaaactacagatctgggacacagctgggcaagaacgatttaggacaatcaccagtagctactaccgtggtgcccatgggatcattattgtttatgatgtgacagatgaagagagcttcaataatgtgaagcagtggctcagtgaaattgatcgctatgcaagtgataatgttaacaagcttttggttggcaacaagtgtgatctggaagcaaatagagcagtgtcatatgaaacagctaaggcatttgcagatggaataggcataccttttatggaaacaagtgcaaaagatgctacaaatgtcgaacaggctttcatggcaatgactgcttcaatcaaggatagaatggcaagccaacctgcaaataatgcaaggcctccaacagtgcagatcaggggtcagccagttgcacagaaaggtgggtgctgctcttcctgaccacagttactcagatccattttatttggtcacctttttcatgtaagattttttttattattatatttcgctaaatagtggaccagtgtcagaatttgtctgttggtttggaactgacctagatgatcccattctttgaatatacttaatgatgtggcttgtgcaaagtataatactcatcaatgctaaatacatattcctattcatatcttttcatttggggc

SEQ ID NO: 8486 - DNA, 1446 bp, Glycine max
  misc_feature (1439)..(1444): n is a, c, g, or t
ttttttttttttttttttgtatacaagctcatttcacccctccagttaccccaaatttcttttttatcatatactaatatgtataattttttttttaaaaaaagcataaattcataaaggcagaccaattatttaaagaacaaaaaaaactaaaagagacaaaacaagccagtttctaagagctctatggctatacacaagaaaagatattgcaagtgaaaatcatttcccctttcttatttaactgtcattgctgcattcccatttagaagtagggacacatgttaagtagcgacaccaatggcagtggtcataccctttctcaccccgaaatagcatcaccaatgcagtcgataaccctgcaatcaacagaataagagacacaacccctagaacatattggtgagtcttgtactttgacttcatctgaacaccggcaggaagacgtcgctgctctaaccaaccgaactgaggacgtggcagcaaaataaagccaaggagtaatcccaccaggaatcctccgatgtgagcaaaattatctacgtgtggcaaaatgccaatgccaaggttgattacaatgatcactagaagggttattaaagccattgctttattggaatatatagtccagtttgtgataagttcagacagcattgcgccaagaagtccaaaaagggcaccagaagcaccaacagagatgtggtctctgataaatagagacgacagtacacttccaccaaacccggacaccaagtatatgattccaatcttaataaatccgaattgctgttcaaggcgaatgccaatgaagaccagactcaacatattagctagcaaatgaataaccccagcatgtaaccaaatgcaagtgaagagtctccatccctgatgtctattcacaacattatcccatcgaagggctcccatcttggtcaatgttgaagaagaaggaccaagcaagggattctcctgcataggctgaaaagagaaccttccaaggaacctggccacgcagcgaccttggaaacgaaggttgttcctgggacaattgttgatgtacatggtaataacaaagacagcaatattagcaaccacaaacataggcacgagccatgatgtccaatgggtctcagaatcataaacatgggaagattcaggtgcagagtagttttcctctgcagttctgttattcttggttcctccaccgccactttcaagatctcttgccataatttctcgcaagtctggaacttttgctcgataccggggcctcgtccccgcgtgtagaggtggaattggtgaatgagtttaaaccgggggaatgagaggacattagttagtggccaagggtatgtcatttactaactgccgcagtaagaacttcacaaacagagattatcggggggggggcctacgtagctgactcgagggggggcccnnnnnntt

SEQ ID NO: 8487 - DNA, 1111 bp, Glycine max
agtgatacaagatgacttatgaatatttttatagatccaagaaataattagagaaatgacaagtaattttacaaagctgacactattattaatattacattaaaaaaaactaatataacacttagattaggacataagtgaaaaaactaatatactcttttcttgcccctgcaagcttaaagaatacagacaacacaaatatcttcgggattgatgagaattgaaaacaagcagcattctcttgccacttgatgggtcttcaatatttgttgaatccggctagcttaaacgaattttaacaccgatcacacaaccacaagtgtatcctttggttgcattcaaaacagggagactaggtacatgtgaacctttggaacaaatttcattcagcacttctggttttgctgattgcatatgccagcaacaagggaattgaaataccatagcctaggagatggagtactgggttcatctcgtaagcttttagaagagttctgcaattctcaagggtgacactattgatactcccatttcttcctaactgcccattgatgctgtatttagaaaagaaatcaaaggaaccaccaacaaccggtacaccaaaactgtcatggttgcctctgaggtcaaaaaacaagctcttatggagtctacttctcttaataacagtgtccagtacagtccggtattccacccattcatcctcattctgcttcattgtcagcaaatccttgcttttaccatctgtgaggtcgccagtgatgaggacgagggaggggttgatgacggaaagagcggggcccacgagtttagcgaaatcgagggctctgtttggatggtgaacgctgaaatgaagatcggaaagctgaaccacccaaaccacagaatcggggcctcctctgacgtgttcgactccttcattgctttcggctacgcaaatgccatacagaatcagaagaagaagaagaagaagcctggtgctccttccacggtgattttgggttcgcagattcatctttgaattggtcaaattcagcgcacaggattggagtgctgctttttctgcgtcatggacactgaaatcatccggggggggggcctacgtagcgga

SEQ ID NO: 8488 - DNA, 1110 bp, Glycine max
ttttttttttttttttttcttttttttttttaggaattactaatagttaattgaattagaatgaagaaattagataattcttgtggaataccggggcattgactgcacccatagtcattgttcataatggataccaacctagcaatagcatggctaacattaggcaaaggccacacgcagcccaagtgttgcttcttctaattaataaaaaccctcttacacaataataatatctcaaaaatattatttgtctattcatattgaattgtcagtcacaatcgaccctttagaaaatcaacgcacaatcttttcaatatctctttatctggctcttgcgatgccgccttaacctttgcatccacagcaaacgcttcctggaccaaatttcgctgaataatacggtcaataaagaacaagagaaggtcataggtgaattccgggtggccttggatgccaaacatgtggtctccatagctaaacatctcaactccagtcatttctgaccaagcaatcacctctgcttttggagggagctctaggatctcatcccggtgacatttgtaaatggaaagctttgatgggagcttaagagatgagaaagccaagggtaaagatgatgacacgtttatagctttaacaccaatgtcccaaccattgggagagcgacccacttttcctcccaatgcacgcccaattatctggtggccaaagcaaatgccaaggatcttcttgtgcatggagtccaatttgataacgagagcaatgaggtcaaggatccatgggtcattggcatgtgcatcatagcagcttccactgatgacaaagccatcgtagagaggcaagtcatgctgctccgggaactctccttggacgagcttgtagaggtcccacttttcctcttgctcttggagcaacttcatgaataccccataggtgcctccgtgcatcttcaccaagtactccgaatcctcaccgcacatcaatagcgcatacctcttcgaacccatatcctctctctctctctctctctctaattattttatgttagtcacacagagagagaaaccccagggatgcctttctttaaacttcaaagcccggacccgtggg

SEQ ID NO: 8489 - DNA, 1733 bp, Glycine max
cgcttttacagtgccgtgttccgtcgtcagctacgtaggcccccccccctccctgtttgatttcaaggtatttgcccgaatcttctttctcgaagggtaaaggataaagggatgatctacacagcaattgacacgttctacctcacagatgagcagctagcaaactcaccttctagaaaagatggcatagatgaagccactgagaccacccttagaatctatggttgtgatctcatccaagaaagtggcattttgctcagattgccacaagcagtcatggctactgggcaggttctatttcatcgtttctattgtaagaagtcatttgcacggttcaatgtcaagaaagttgctgccagctgtgtatggttggcttcaaaactggaggaaaaccctagaaaagccagacaagtaattattgtttttcacaggatggaatgcaggagggagagttttcccatggagcatttagacttgtattccaagaaatatgttgatttgaaaatggagttgagcagaacagaaagacatattttgaaagaaatgggattcatttgtcatgttgaacatcctcataagttcatatcaaattaccttgctaccctcgaaacacctccagaattgagacaggaagcttggaatctggctaatgatagtttgagaactacattgtgtgttcgatttaagagtgaggttgtggcttgtggagttgtatatgctgctgctcgcaggttccaagtaccccttcctgagaatccaccgtggtggaaggcatttgatggggagaagtctgggattgatgaagtaggcagggttctggctcacctttatagccttccaaaggcacaatatataccagtctgcaaggatggagactttacattttccaacaaatcatcagaaacaaagtctcaatcaacaccaaaggatgttccacaaaatagttccccagctgatactgacaactcagtgccaaagggagctcaaggagaagctaatactgaatccaatggtggcaagggtgcaatggtaaatgtagccattgataagctgaaagattctaaaaggtctgatgatgaatccaaaggcatgagtacagaaggagaggcaagagacgaacccatactgaagtccaaggctgaccatattggggagacacgcaggaaccgggatcgggacagggatagagaacgagataggggtagggaaagagacagagatagggacagggacagaacaaaatccagagatagagatcgaggaagggattctgacaaagaacgtgaacgagaggaagctgagagggacaaactcaaggatcgtggtcaccgttctagggagagagcaaaggattcaggacattcagagaagtcaaaacgccattcgtcgcatgatcgggtttcttactcgtcaagggagaaagatcggcatagacatcattgacattagtttagaggatatttcaagatgaacctgcttcggtgtccatgacacctgtcaaagtcagtcaactgatcaagcattgcacgtcctttgatcttataatcagtaaacaatttagggtcttatttgagaagtacttatgtaaacattttatgtataactttttttttgtttatagtcgaagagagattgagttattctaaaaaaaaaaaaaagtcaaaattatttttatgttattttgaagagttaattgaaatccgttaaaaataacatataggcatattataagt

SEQ ID NO: 8490 - DNA, 665 bp, Glycine max
tgtgcggcgctcgaggcggccgtccgggagtatcaactcttgaacattccttttgagttattagaccattctctatatagtgatcctcaaacttaaaagtttttttgttgatcattttgtcttgaagaaatggcatctagctcaatgtcatccactggctcatggagtgccaaggacaacaaagcctttgaaagggctctagctgtgtatgacaaggacacgccggaccgttggtacaatgttgctaaggctgttggtggtgggaagactcctgaggaagtcaagaggcactatgaactcctccttagggatgttaggcacattgaatcagggcaagtgccattcccatacaagcaaaatggagggtctcaagaggagaaaaggctgagaaacatgaagctccagtaaccaattggcatcaggaacaaagaattttctgattttcaccatctagcaatttttctataatcccagtgctacgtaataagtagtgctagtgacgtagtaggattagaatatatattattcataagaatcgtatccgatgattccatgttgtattgtcgttgaagcaaccttaaagaatcaacgactctgtctaagttccaatcatattaataaagtttcaattttatgcgtttaagttgttaaaaaaaaaaggcccc

SEQ ID NO: 8491 - DNA, 1209 bp, Glycine max
tagtgaatttgctcttatgcaattacatattctataccgtgccaaatgtataatatgactaggaatctcagcttagccaaatggaaagctcggtggggtttgtttggttttgttgcttctaccaaccaagtctatgtctacattgtataaaaaaaagtctatatctacatttattaggagcttgataggtatatggaactattaacacatagagtgccccttcaagcatcaaagaattggtggggtgggactatcccatgcttcctactattctggcagctaccatggtcaatctcctttattaaaatgcagaagagccatggggaaagtccttttttctctttgtttctttttttttttcctcccctcccctctttccttctcctctcgtgtaaaatgaaaattctctatactttaccaaaactatgcaaaaagaaaaggaaaaagaaaattcttgcagcctagtttcattgctgtggttatttcctcctgagttaggaagaagtcctcctagctgccatgccacttagaaagaggcattccacaaggctttctcaccttccccacatctcttgtgaacctctttgatcctttcagcagacctgcaaattccactgcacgtccaatcaaatgaagcaacacaaacgttgcctgcttgtgctttccattcacaatctggtggtgtaccacagcagagtcttcgatcatctatgtgattcacatcaagtccaataaaccaagaacctagtgagacatcctcattggcatacttgtggagaacgtgcttgttatttgaaatatatgtagccagatcttttgaaatggcatacaactgtcctgtggcgtggcggaagtacttgtttccggcctctccaaatttccagtattctggttcatggtaccttacccctttttgagaaagaacaggcccagatttcatgcatcctatgtacacccgcggttttgatcgatgtctcagtagagtttgtcccagtgtcgctatatttacatgaacatcgtcatcaactttgatatagaagtcagcatcccataagttaacagcagtggcaaagtatgtctttgtctttgctgacaattcaaggtatccttcaacatgatccagtctcaggaaatctccatgcttcctatcttctgcttcaatagctctgtctaagataccccctgatgtggcactatgaccaattacaa

SEQ ID NO: 8492 - DNA, 2000 bp, Glycine max
accggatttttaccaaaattttaacccttcaattttccctttgcccttccgggggtccaattttttgaaaggggcatcggttcgggccttttccttatttacccaaactggggaaaggggggaattcttccaaagccgattaaattgggttacccccagggtttttccagtcccgaccgttgtaaaaacgccggccagtggattgtaattcgctccaccatagggcggattgggtaccgggccccccctcgagtcaagttcgcaggccccccccccccccaatgacagctcatgatatatcttctgatggagatggaataagccaaaagatgaaggagttctctgttacttttaataaagttacatgcaatgaagcaagtttgctgcagttcgttcttgacctgtctaatgttctagccaaagcaagtgaatttagatttaatatccttggttataagggtagagaagctgaaactaatagtcctgattgcatagataagattgctctgccagaaaataagttagttcaagacaattcatcaggagagagatttcaaaatggtcgttcacatattcttaatccctgttctgatcctgagattcctgatgatggaaatttggccccaggctatgaatcaaatgccacgtcacagaagttctcaatggagaactttgaagaattgaaattagagaaagagaaggcagttgttgatctgtcaaagtgtgttgaaaatcttgaaatgacaaagtctcgattactagagacagagcaacatctagctgaagttaaatcacaattgacttctgctcaaagatcaaacagcctggctgagacgcaactaaaatgtatgacagaatcatacaggtcaattgaagcacgcgcaaaggagtttgaaactgagcttaatcatctgcaaatgaagacagaaactctggagaatgaacttgaagatgaaaagagggctcatgaagaagctttggctaagtacaaggagctagaagaacaactacaaaggaatgagagctcagctgctgataatgacattaagactaagcaggagagagacttggaagctgctgctgaaaagttagctgagtgtcaggaaaccatatttcttcttggcaagcagttaaaatcgatgcatcctcaaacagagccaacggggcctccttattcaaaggctgaaggcttcgcagagcgtgaacctaatagcccaaattttcaggatcaagcagagatggacagtgctagttctgcatttgtgcaaagactgggtggagagtcccccttacatttttctaacagtttatacagtccatcagataatgagtcaaactttccagccatatcttctgtacagaatccaaaccacaggcctacaaagtcaacctcttcgtctgcttcttccactcctacaccggagaaacacaaccgaggtttcagtagattcttttcatcaaaaggaaaaaacggtcattgagcatgcatgaccgatgggaattcttgacttaagggaccacacagcaatggcatttggaaagcatcaaggttcaatccgcttcatgatttaacagaattgagtttttaggaggtttgtgtagttaaaggacaggatgccatgaatatcgggtgattcttgtatctaatggttgtacatggtaaacatgtcttttcttcttttcctttccattgttttgttctctgttctgtaatttaattagcaaacattgacatagcctctgaactattacaggatatgttgaatattgttgtatttcacaaatttaaaaaaaaaaccttgattctttaacaacgacaacttaaaataaaaaaaaaaaaaaagggcggcgctcgcgaactaaacccactcgtgccgctgttcgctctgcgactctcactctctctatatttgcatcattcatcggaaaaggcttcgaggttgctgttaaagctgctgttggggctccaaatgttctccgagaatgtccattttcccaaa

SEQ ID NO: 8493 - DNA, 2240 bp, Glycine max
  misc_feature (95)..(99): n is a, c, g, or t
  misc_feature (2198)..(2198): n is a, c, g, or t
  misc_feature (2234)..(2234): n is a, c, g, or t
gcctgcagaagctgctaacaagcagcacatggagggtgttaaaataattgctaaactagaggcagaatgccaaagattacgtggtctagtgcggnnnnngttacctggtcctgccgcacttgcgcaaatgaagctagaagttgaaagtcttggccgagaatatggagaaactcgattgaggaagtctcctgtcaaacctgctagttcgcacatgtccacattggctgggttctcccttgataatgctcagaaattccacaaagataatgaatttcttacagagcgtttattggcaatggaagaagagacgaagatgctgaaaggcgttcgggcaaaacgtaacagtgagttgcaggcttcaaggagtagttttgctaaaactttgagcaaacttcaaattttggaagcacaagttcagacaagtaatcagcagaagggatctcctcaatccatcatccatataaatcatgaaagcatttacagtcaaaatgcaagcaatgcaccaagcttcatctccttgtctgaagatggaaatgatgatgtgggaagttgtgcggagtcttggtctacagcaattatctctgagttatcccaattccctaaagaaaagaatactgaggaattgagcaaatctgatgccactaagaagttggaactaatggatgactttctggaggtggagaaattggcttggttatcaaatgaatccagtggagtttcagttacttcaaacaatataacaaatgaaattgtggtcaatgatctatcagaggtcagtgctgggaaagatgttccctctaacacccaagagaacagtgagccaaatccattgccaagtgaggtttcttctgctgaggaattgtcagcacctgatccccaatctgatgttccagctggcttgtcgctagcagagcttcaatcaagaatatcatcagtttttgagtccttggctaaggatgctgacatggagaagatcctgaaggatattaaacacgctcttgaagaggcatgtggcacttccatccaggactctgtatctgccattccccatgatgtcaagccttctgatactacgtgtgatgagctgggtaatgctgaagatgctggctcaaatgcagaaaaagaaatttcgtcccagaaacctacagaatttgtgcagatgacttcggatttagaagccgcaacttctcaaattcatgactttgtcttgttcctagccaaagaagcaatgacagctcatgatatatcttctgatggagatggaataagccaaaagatgaaggagttctctgttacttttaataaagttacatgcaatgaagcaagtttgctgcagttcgttcttgacctgtctaatgttctagccaaagcaagtgaatttagatttaatatccttggttataagggtagagaagctgaaactaatagtcctgattgcatagataagattgctctgccagaaaataagttagttcaagacaattcatcaggagagagttttcaaaatggtcgttcacatattcttaatccctgttctgatcctgagattcctgatgatggaaatttggccccaggctatgaatcaaatgccacgtcacagaagttctcaatggaggactttgaagaattgaaattagagaaagagaaggcagctgttgatctgtcacaagtgtgttgaaaatcttgaaatgacaaagtctcgattactagagacagagcaacatctagctgaagttaaatcacaattggcttctgctcaaagatcaaacagcctggctgagacgcaactaaaatgtatgacagaatcatacaggtcaattgaagcacgcacaaaggagtttgaaactgagcttaatcatctgcgaatgaagacagaaactctggagaatgaacttgaagatgaaaagagggctcatgaagaagctttggctaagtacaaggagctagaagaacaactacaaaggttagagacacattcaatattataagtgctgaaagtatacattcagcataatcctgccctagcaagttttttgtcacatcatttgtgttttgtttatgttggtttaagtaagaagatataggataatggtagcactgcatatatttaatttccttgccaacattaacttggaactcatgctttcaaatattttacgttatctctcttgctggttccatttcaaattcctaatttncccatgtttctactgtactgttaggaatgagagtcncagggg

SEQ ID NO: 8494 - DNA, 1214 bp, Glycine max
gtgatatggatagccatgatttgaattcccctgcaaccttgaaatctgaattttcacataaaccgcattcaagacaacagtcaaaagataatctagatttgaacaaaataatggatgatttttgtcatgttgaagctgcttgttccatgatgaatgatgatcatggcaaaattgatgaacagtcaaaccaaaagcatgttatctctgaaaacctagctaatgcaatccatgaatttgcaaatcagatgagattgaatgggaaagatctgcctgaagatggacaattgcttagctcacatgaactcatggaagcacttcaggttataagttcagataagcaattgtttcttagacttctacaagaccctaattcacacttattgaaatacattcaggagttggaaaatgctcaagggagaggtggcaaagaatgcagttcagttaccagctccaactgctctgaacatgaacttgttaaactgaaacaaactagggagactgccaaccgcaagcatcgtaactttttcaggaaaagggtgaagtctcaaccaaaagattcaacaaatgaaaatgagaaaactgaattttcagctacgtaggccccccccccccattctgaaacctgcactaacaggcatgcaaatttctgaaagtggaaacaaccttgcctcatcactagattctcatgacattgcccagtacaggaatccttcagtgagagttggttcacatttttctcttacagagataaaaaggaaattgaaacatgctatgggaaaggagaggcatggaaaccctgaattgatcccacgcaaactccctgttgaacgtcaaaataaggtgccaagaggcaaatgcaaagataatgctggaatgagatctcctaataaagaccatttcttcattgaaaaaattgcaagacctatgtttgatgttgtgaaaggaaacaagactggtacattgaaagactctgaattgaatgtggaacatgaaagtggtattcccaaccaaagtgtttcaaacatatatattgaggctaggaaacatctgtgtgagatgctagataatgctgatgagagcacaaacatttcaagcaggcagatgccaaaaacccttgggagaatactttctcttcctgagtacaacttttctcctctagaaagtcctggaagggatttagagcatcattctgtgactgcacaggcaagattttc

SEQ ID NO: 8495 - DNA, 859 bp, Glycine max
tttttcaaacgtgcccttggtagacggcaagcttccaatgaataaaccgacttaaatatcatctcagttcacatatcttctattggaactaaaagtaaaacatgaagaagacataaaatcaggaatcatgaaacactttttatggagccactaatatataatgtcagctccacactgcagctaatcgtttatgtgcataccatgattctctcatgctacaaagataattgaaaactgactgtttaacagaaatctctagcacacaggccaattgagtaactaacctaatcatatgaaatgagatcactacttaagttatacaatttcataacagtgacacttgttattaaaatgatcacatagttcatcagtccagtcatgcagtcctcaatggcggggaaaccaatatcaccccatctcccctgacaaacaggaaaggaactgtccgctttgtagtcctcacaatttcttcgtatgtctcatcatcgatttccactgtagtaacaatttcttcaacatcaccaagaatcatattaagatgctgatcataagcgtgaagtttgccacgaagctctctgtcggaacggagtttgacatagatacgctcgtcgaggctgagcctaatgagatccaaaggctccttcaccgcactctcttcctctgtagccatcaatgacttcaccagttgttcgacccttttctcactttctcttttttcagtggttgtgttcttcgagttgaaggtatttcaagtttttttttttttcttgttacccctctttttgagtcccccttctgtcgtcttctcgcagccgtatccttctgtcgtcttctcgcagccgcggacgcgtggcagaaa

SEQ ID NO: 8496 - DNA, 915 bp, Glycine max
  misc_feature (1)..(23): n is a, c, g, or t
  misc_feature (25)..(31): n is a, c, g, or t
  misc_feature (33)..(37): n is a, c, g, or t
  misc_feature (40)..(44): n is a, c, g, or t
  misc_feature (49)..(53): n is a, c, g, or t
  misc_feature (55)..(59): n is a, c, g, or t
  misc_feature (61)..(63): n is a, c, g, or t
  misc_feature (65)..(68): n is a, c, g, or t
  misc_feature (74)..(74): n is a, c, g, or t
  misc_feature (76)..(76): n is a, c, g, or t
  misc_feature (78)..(79): n is a, c, g, or t
  misc_feature (81)..(82): n is a, c, g, or t
  misc_feature (84)..(84): n is a, c, g, or t
  misc_feature (891)..(891): n is a, c, g, or t
  misc_feature (900)..(900): n is a, c, g, or t
nnnnnnnnnnnnnnnnnnnnnnncnnnnnnnannnnnccnnnnnaaggnnnnnannnnngnnncnnnngggggngncnntnnantttttggggttcccccgggttctgtttttttttttttttttttttttaaagataatagcattaaattgtattcaaacgtgcccagttcgcatatcttcaatgggaactaatagtaaaacacatgaaggcatcaaatcaggaatcatgaccaacactttttatggagccactaatatataatgtcagctccacattgcagcaaaaatccttgtttatgtgcatgccatgattctctcatgttacaaagataattgaaaattgactgtctaacagaaatctctagcacacgaggccaattgagtaactaacctaatcatatgaaatgagatcactacttaaagttatacaatttcataaacagtgacacttgttattgaaatgatcacatagttcatcagtccagtcatgcggtcctcaatggcggggaaaccaatatcaccccatctcccctgacaaacaggaaaggaactgtccgctttgtagtcctcacaatttcttcgtatgtctcatcatcgatttccactgtagtaatgatttcttcaacatcgccaagaatcatattaagatgctgatcataagcgtgaagtttgccacgaagctctctgtcggaacggagtttgacatagatacgctcgtcgaggctgagcctaatgagatccaaaggctccttcaccgcactctcttcctctgtagacattgatcacttcactactttttaaacccttttctctctttcaacccttttgagtggttgtgttcttggagttggaggtatttcaagttttttttccccgaaccggcccccgnagggggggncccggtacccaatcg

SEQ ID NO: 8497 - DNA, 1410 bp, Glycine max
tcagctacgccttctcctttatctgattttgaaattggccttaacagacacgaatcctgattccatttccgcttccgccttctttctctttccgctaccacgaatctcgtgcacgtgctgttgcagcaaaaaaatgccagaaattcagttgggtatgcatactatcagatcacatggaactagagtggcaaggatacatatgcatgactggttgattcttttgcttctggtgatcatcgatgctgtcttgaatataatacagccatttcaccgttttgttggagaggggatgatgacagaccttagatacccattgaaagctaatacaattcccttttgggctgttccgataatagcaatattgttaccactggctgtttttctcgtttactatttcattcgtaaggatgtctatgacctccaccatgctatactgggccttctattttccgtactcattactgcggtgatgactgatgctatcaaggatgctgttggacggccaaggccagacttcttctggcgttgtttccctgatggaaaaggggtgtttgatccagtaacaagtaatgttctgtgtactggagataagggtgttattaaggaagggcacaaaagtttccccagtggacatacctcttggtcctttgctggtcttgtttatcttgcttggtatctatctggaaaacttagggcatttgaccgcagggggcatgttgcaaagctctgtcttgttttcttaccaatcctcgtggcagctatgattgctgtctctcgtgttgatgattactggcatcattggcaagatgtgtttgctggagctcttatagggatgataattgcttcattttgttacttacaattctttccacctccatatgacgtagatggttggggacctcatgcatatttccagatgttggctgaatctcgtaatggtgctcagccctctactgtcaataatgagattcatcatgtgcaatctgctgagcttcaggctgtatctttgtatatcccacctcaacatgatgcagatacacgaggcaatagctgggattcaagccccatgttaggtgcatcccaaaatgtaagaacacactgacgacataggaaagatcaccaacatgtccataatctgtaaaaattataggagggattcgttgcagataaaccactttagcattgttggtggtttaaaatgcggatatcaatcaatttctttgcttgttggattggaaatttgggatgccatgttagttgtctttaattttccggccagcttatatttgttagttgtcaaagcactgtttctatacagagaatgatttaatcggctcaacaggattcaagcatacaatattttgcaactcgaggaaaaggggggaataaatgaatttcttgaactcctat

SEQ ID NO: 8498 - DNA, 1908 bp, Glycine max
  misc_feature (24)..(24): n is a, c, g, or t
  misc_feature (1895)..(1895): n is a, c, g, or t
  misc_feature (1897)..(1905): n is a, c, g, or t
tcgagtcagctacgtaggcccttncccccccattcttctttcaatataggccccccccccaaaaaaaacaaacactcgaaaacgcaaatctgggggaatatcattatcaccaaaaaccctttgtgtttgagcttccgagaaagtcttgatctccgctcatggcttctccgcgagctgcagaaaacaccgagaatagcttggagaagatcaagcgccagctcgcttccgcttccggtagaaacctgttgcaaggaccacttctcaagagatctgaaaccctgagaaaatggaacgagcgttgggtcatcttggacccgactacggggagaatggaatacaagataagacgaaatgaaccttctgttaaaggaacaattatatttgacgccaatagcaccatcaccatatctcccgtgaatttccacgggcttccaaagtacgatgggtgctgcttttatattgggacaccacagaaaaaggattacttcctctgtgcagagactcctggtgcagctagagcatgggtgtcaactttacatgcaactcagttggttctaaaagcccataaagaagctgtgaattccttaagtgggaatggctctacaaaattaggaactgttgcaacagttgttgctgcagccaattcaacagccttggaatgttcaaaagaaattgaagcagcaatgcagatttctttgcgaaatgctctgggaatgatgaataataggactactgatggtcctatggatgatttaacaatcatgaaggaaacacttagagtgaaggatgaggagctacagaatttgtctcgagaccttcgggcacgtgattcaactataaaagatatagcagataaactctctgagactgctgaagctgctgaggctgcagcatctgctgcatatactatggatgagcatcggagaattgcttgtgcagaaattgagcgtttgaataatgattctgagaagcagcaagagctgtttacacagaagctgaaagagtctgcagaaaagattgtgagcttaagcaaagaaagagagcaattaatcaggcagagagatgctgctattcaggaagcaaatatgtggcgttctgaactggcaaaagctagagagcatgatgtgatcttagaagcagctgtagtaagagcagaagaaaaggttagggttgcagaagcaaatgctgaaactaggataagggaggctgttcagagagaatccgcagcattaaaagagaaggaagagcttcttgcatatgtgaatgtactaaaagcccaacttcaaaggcaacacattgatacaactcaagtttttgagaagacagagtcatgctcagatacaaagcatgttgaccccacagaagagaatgtggataaagcatgcctgagtgtttctagagccatccccgtccctgcagagaatgtagtccacatggcaacagatcaggtgaacattcaaccagttggagataatgaatggagtgatattcaggctacagaggcgaggatagctgatgtaagggaagtagctcctgaaactgatggaagcagcttggatattcctgtggttagccagcctggaaccaatcaccaccatgaacaaggagctaactctttccatcaaccctgatatgttattcacaagtatacaacatagagcaaatttcaactttaggcattgtataccattttgttggatgatcgtgtaaaccatattgttttcattttatcattgcctaatcaagctgcgttatgacctgccctgaaagtgaataccttttttcttatgtaaatgtaatgtaatacaacacgagctgaccgataaatcatctgtgatatgtaacatttgatcaacgaatagagccctttttttatccacaatgaattgaggacnannnnnnnnntca

SEQ ID NO: 8499 - DNA, 1117 bp, Glycine max
ttaacgtaaataagtactataatagctatctatcgaaaccagcgagcaagatcgattcgggtcaaacatggatgggcaatcgccggagaaactgattctggtgaagcgcgagtcaaacggcgtcgcactggtgatgattaatcgtcccggttcccttaactcgctgacccggcccatgatggtggacctggcccaggctttcaagagactcgaccgggacgagtcggtgcgggtcgtcatattaaccgggtcgggccggtctttctgttctggcgtggatctcacttcggcagaggacgtgttcaagggcgatgtgaaggaccctgagagcgacccggtggtgcaaatggagctctgccgcaagccaatcatcggagccatccgaggtttcgccgtcactgctggcttcgaaattgccctcgcctgtgacatcttggttgctgccaagggatctaagttcatggacactcatgctaggtttgggatatttccttcgtggggtttgtctcagaagctttcgcagatcataggggccaataaagcccgggaggtatctctctcggccacacctttgactgcagaggtagctgagaggttgggtttggtgaaccatgtcattgaagaggctgaattgttgaagaaaagcagggaaattgcggatgccattgtgaaaaataaccaagacttggttttgaggtacaaggcggtcatcaatgatggcctcaagctggatcttggccgcgcactttctcttgaaaaggagagggctcatgactattataacggaatgacgaaggagcaattcaggaagatgcaggaattcatagctggtcgaagttccaagaaacagtccaaattgtaggttctttattttcgctgatctctcgtgctgtaaatgtgtatatgtttgcttccccaatttggggttttacgagcactattccatacaaaaatcggcctaccttggtttttaataatgaattatataaatgatagcagttcctcgtcatcgaaattcaaaatgaatgttgttatgaattatttctggtttttgttgacttaagtatgtctgtattagtgtttttaaatatggaaattctattagtcccttgccctg

SEQ ID NO: 8500 - DNA, 627 bp, Glycine max
tttttttttttttttgacataatcacttttgttgaattgataaaatagagcttcctcagttacttcagaaatcgaacaatcaactatgacaactacagtttcccaaacacacaataaccaaaaggagaaaaaatggagcaattcaaagcaatacacacataccaaaatactctagcaaggtaagattatcaaaattgcttttacaatttataaggacaaaggctcaaagacaatgcgccattcacaagatacattcaaaaccatccttgtttctccgatcattaactatttacttgctggctcttgtggcggcttaatgatgcctagttgcccaccatccttcgttgctagagtcgctgctttgatctcattgcagtggttaatgaatttgctcacctcacgatcagtatccatatcctttgtaaccttggatggcttcacgaatctctttcctttacgagtaacagggactttcccatgacgattgggaggtattgatttcttctttgctttacccttgaaaagattcgccttctgcgtcatttttctctgcttctgttgttcttctggggggggggggcctacgttgctcttttgagtgcaaaaattctgaggttgggaaatttc

SEQ ID NO: 8501 - DNA, 630 bp, Glycine max
ttttttttttttttttgaatagataaaatagagctttctcagttacttcagaaatcaaacaatcaactatgacaactaaagtttcacaattgagcaaaccaaagcaatacatacataccaaaatactctagcaaggtaagattatcaaaattgcttttacaatttgtaactacaaaggctcaaagacaatgcaccattcacaagatacattaggaaccatccttgtttctccgatcataaactatttacttgctggctcttgtggcggcttaatgatgcctagttgcccaccatccttcgttgctagagtcgctgctttgatctcattgcagtggttaatgaatttactaacctcacgatcagtatccatatcctttgtaaccttggatggcttcacgaatctctttcctttgcgagtaacagggactttcccgtgacgattgggaggaattgatttcttctttgctttacccttgaaaagattcgccttctgcgtcatttttctctgcttctgttgttctactgattgctagggttagggttttaacttgtgcaaaaattctgaggttgggaaatttctgatgcaccccctcgcttggttggcgccccccgcgtgcacgtcgggggaga

SEQ ID NO: 8502 - DNA, 1419 bp, Glycine max
cggccgctcaggcggcgggcgggtcttctatattgcggattgttcggttttagtctcactgccaaagtagtgtatcattacttatatttatggtcagccagacagccaccagaccaagccgcattttctcttttcatttttttccattaatagttgtaataacaaataccatggacctgatatccagcaaatcaatagaattttcgtagtcaactaattcttgtgacagagtagggagcttctgcgggagaggttactggccgatgatttgttcctcgctaaggttgccatggagtgcggtgttggcatctttacaaagactgctgcggagttggagaagcgcaaagaaaattttactaaggagcttgattttgtttgtgccgatgtggtaatggccatcgtagcagattttatgcttgtgtggcttcctgcccccacagtttctctccgaccaccacttgctgttagtgctggaactattgctaaattcttctatggctgccctgaaaatgcttttcaggtggctttggctgggacctcatattcacttattcagagaataggtgctatagtgagaaatggagcaaagctatttgcagttggaactggtgcatcactgattggtacaggtgtaactaatgcgttgatcaatgcaagaaaagttgttgataaatcttttgctgctgaggcagaggatgtaccgataatatcgacaagtattgcctatggggtttacatggcagtatccagcaacttaaggtaccaagtactagctggagttattgaacaacggattcttgaacctttgctgcaccagcacaaacttatgctaagcgcaatttgctttgctgttagaactggaaacactttcttgggctcactattgtgggtggattatgctcgctgggttggagtccagaagatacgggattaggcataatggttcttcagttacaagatattttcataggatgatttgggtcaaatcttgtctgttgattcattattgaagtacagttggtttgttgtatttttttttattcctcctgaaagcaatgttgtaaattgagcaataacggagggcagcaagcaccttgacttgagtctccaattatcaccgtttatgctggccagtgaaggtataagatccatctctcgtagctagcagaaagctgcagcatgagatgaatttgagtcacacatcttcactagacatttgtggggcaatgcctatattgttcttgtgtgttttgccttctaaagttaaaaatgaatagagacaaattcaaattggcagtgccctaatagctgttgcttaactttgtttcttttatcattattcatctaaaagcttctgtaccccccaaaaaattaaaaaaaccccccccgctcgcgatctagaaccggacgcgatgaaca

SEQ ID NO: 8503 - DNA, 1701 bp, Glycine max
ctggctactggtggtgaggatggtatggtacatgtgtggaaaggggttcggcacgagggatccagtgaattggacattctggacgatgatgcgtcaaatatatatttcaaaataaataatttttcatgcgttgctccccttgatgtagataaagagaagttagttaaaacagagaagttgaggagatcctctgaagcaacctgtgtgattgtcccaccaaagaccttccgcatatcatcaaaacctttgcatgagttccaagggcacagtggtgacattttagaccttgcttggtccaaaagagggtttctactgtcatcctctgttgataagaccgtgcgcctatggcatgtaggaatcgacagatgtcttagagttttctaccacaataattatgttacatgtgtcaatttcaatcctgtcaatgataattttttcatcagtggttcaattgatggaaaagtgcgcatatgggaagttgttcactgtagggttagtgattacattgatatcagagagatagtcacagctgtgtgcttccgtcctgatggaaagggcacaattgtgggtaccatggcaggcaattgccgtttctatgatatcgtagataatcatctgcaattggatgctcagttgtgtttacgaggcaaaaagaagacatcagggaaaaagatcactggctttcagttttcacctagtgacccaagcaaactattggttgcttctgctgattcacatgtctgtatactttctggagttgatgtaatctacaaattcaagggtctaagaagtgcaggtcaaatgcatgcttcattcaccaccgacgggaaaatcttctgaagttcatatcatctcagttagcgaggattcaaatgtatgtatatggaattacactggccaagatagaaatacctccaaagcaaagaaaatttggtcttcagagagttttctctcccacaacgcagccatcgctgtaccttggtgtggcattgaatcaatgccaggaacactcttatccccatcgctaggagaggatgtaaatcagaggtgttctctgccttctcctgattgcttcttcttgagtcgcggatttctgtctgagttgatcccaaaggtttctgcaacatggcccgaggagactcttgtggactcatcgtgtcaaactcaaactgttgtttctcctacaatgtgtaaatcagagtacaaattcttgagaagtgcttgcaagggaatgtctaattctcacttgtggggccaagtaattgtgacagcaggatgggatggatacataagagtgtaccagaattatggattacccgttcgtggctgaaaccaaagtttaggctcatttgttggggaattataaggttatttgctatgctcacatagcattagagggttcttggatacaatagaatttgcttcaatgcaaaacttcattgttttcaagcataatagtatagcagccagggaaattcttcagtagctgattggtgattgccctcacataataatattctttatactaagtcgatatcaattatatgattcttttaatttttaaggactgttggttgaaagaatgtaagtttcagttttgctgatggtcctgggcgaaatgtaattcatgatcatttgtatatacagaggactgtattctatattaatttaatacaagaattttttgttcgcacaaaaaaa

SEQ ID NO: 8504 - DNA, 2478 bp, Glycine max
  misc_feature (2426)..(2426): n is a, c, g, or t
  misc_feature (2435)..(2435): n is a, c, g, or t
  misc_feature (2438)..(2438): n is a, c, g, or t
  misc_feature (2443)..(2443): n is a, c, g, or t
  misc_feature (2452)..(2452): n is a, c, g, or t
  misc_feature (2457)..(2457): n is a, c, g, or t
  misc_feature (2459)..(2459): n is a, c, g, or t
  misc_feature (2465)..(2467): n is a, c, g, or t
  misc_feature (2474)..(2474): n is a, c, g, or t
ccacgcgtccgcagtagccggttctacgacgaccttcgttctcaattggagaatgacttcgtgcattctcttcgcgatgaggttgttgaaggaggtgaaacggaggctattcggccgttgctgtggtaccctgggaacttcgcttggcattcaaatttttctcggatgcagctcaggaagaaccaaacgcttgagaggttccatgaattcttacggcccggattcccgcgtcgacccacccctccgcaggaagctgtcagtatggttcctcccctcttcttggatgtgcattcagatcattttgtgcttgatatgtgtgctgcaccaggttcaaaaacgttccaattgcttgagattatacaccaatcatctaaagcaggatcactacctgatggaatggttatagcaaatgatctcgatgtccaaagatgtaatcttctcatccaccaaacaaaaagaatgtgcacagccaacctaattgttacaaatcacgaagctcagcacttcccaggatgccgtttaaacaggaattatgaaaggatggagttagatcacgatattggccaactgttatttgatcgtgttctgtgtgatgtcccatcagctgcggaggcccccccccgtaaggcacctgatctatggaggaaatggaacacagggatgggacatggccttcacagcctacaggttttaattgctatgcgaggtttatctctacttaaaattggtggaagaatggtctattcaacatgctcaatgaatcctattgagaatgaagctgtggttgctgaggttttgcgaaggtgtggagggtctgttaaacttcttgatgtctctagtgagcttccacaacttattcgtcggccaggtctcaggagatggaaggtatatgacaagggcacttggttggtctcttacaaagatgttcctaagtatcgtagaagtgtaattctttccagtatgtttccttctggcagaggccatcatgatcttgtggatagtagttgtagtgttgatccagagggcgttactaatggtattaatggaaatgctggagatggtgttcaagcagttgagaatcctgtgatgtccgagtctggtgcggaagtttgcgatttccctctagagcgttgcatgaggatagtgcctcatgatcagaacactccccccttcttcattgctgtactgcaaaaagtttctcctctgccagcaattacagaacaaacaaaaataaaaaatgatgagcaatatgtagaacccgcaaaccagagtcttaatgatgcacaagtaccacatattacttcatcagaaagtgcacacgaagaagtcttcaaagcagtgtctgaggaaaatgtagatgacgctgaacccaacactgaagatttggaagttggtcctgttacatgtgaagaacagaattccaaggaaactcaagaacctgataatgtacaaaacacagcaaagagggttccaggcaaaagaaagctacaaattcaaggcaaatggaggggtgttgaccctgttgtctttttcaaagatgaaacaattattaatagtataagggatttctatggaattgatgagcgttttccattcaatggtcaccttgttacaagaaacagtgatacaaatcatgtgaaaagaatttattatatctccaagtcagtcaaggatgttcttgagttgaacttcaaagttgggcagcaacttaaaataacatcaattggcctgaagatgtttgaaagacaaacagcgcgagaaggtagctctgcatcatgtgctttccggatatcatccgaaggattgccccttattctcccatacataaccaaacagattctgcatgcatctcctgcagacttcaagcatattctgcagaacaaagaagtaaaatttgaagattttaatgatgctgagtttggtgaaaaggcagcaaacctattgccaggctgttgtgtggtaattctgcatatagggaacacacttgctgcagagtctctccaagtggatgagtcaacgatagccattggatgctggaagggtagggcgagattgtcagtgatggttactgcaatggactgccaagaactacttgaaaggcttttaatacggtttgacactgaaaagggttcctctgggcatgcagacaaatcctctaatgatgtgcaagagttgaacagtataaatgatggcgtgaaagttactgtgagttaaaagtgaactatttaacagatattctttactctgttgtaacagatatttatgctatttgtcatttacagaaatggtgattttgtccaccattattttgcttgtttttgttaaacgatagtgaaaaaactcgtcattattttcatacacaggcgctggtccatatttgtattaatattattctatagttttggtttcataaaaaactgcggcgnactctttgncanacggnttagggganaactngntttttnnnggccccncccc

SEQ ID NO: 8505 - DNA, 1006 bp, Glycine max
ccacgcgtccgcgcgcgcgagatttgccaaaaccctaccaaaagcctaacggcataactcgccggcgaagcagaatcagaagcaatcagcgacgacaacaatgggtggtggggggagaggaggcagatcccgaactcagagaaagcacttccggcagagcagagataacgtgtggaagcgttccaaatcggatcccaatccttcttccaacgaaaacaatcccccgtggactcccttcgccactgagaacgccgctttcgatttctactacaaagagcaggggatagtggacccgcaacactgggaccaattcgtcgcagttctcagaactccattgcccgcaaccttcagaatcaactctagtagccagttttccgacgaccttcgttctcaattggagaatgacttcctgcattctcttcgcgacgaggttgttgaaggaggtgagacggaggctattcggccgttgctgtggtaccctgggaacttcgcttggcattctaatttttcccggatgcagctcaggaagaaccaaacgcttgagaggttccatgaattcttaaaactagaaaatgagattggaaatatcacaagacaggaagctgtcagtatggttcctcccctcttcttggatgtgcattcagatcattttgtgcttgatatgtgtgctgcaccaggttcaaaaacgttccaattgcttgagattatacaccaatcatctaaagcaggatcactacctgatggaatggttatagcaaatgatctcgatgtccaaagatgtaatcttctgatccaccaaacaaaaagaatgtgcacagccaacctaattgttacaaatcacgaagctcagcacttcccaggatgccgtttaaacaggaattatgaaaggatggagttagatcacgatattggccaactgttatttgatcgtgttctgggtgatgtccctgcagtggagatggtacccttcgtaggcacctgatctttggagaaatggacacaggat

SEQ ID NO: 8506 - DNA, 1007 bp, Glycine max
tagaattgattcttaagtgttattcaaacacactataaaaaatatgatctatgttacaagcaatcacataccccatgggcctaaaagaatttattcccccaatacaccgtctttaactatgaagatcgaagatatccttgtaaacatcttttcaaaaccaaacttcaaacaatctaacttgttctacaaattttcatggatcaatcaatacagctagtgttatgttgctggaaccaaaaaaccaatatacaaaaaccatgttaagagcaaattttaatgggatcacaggtattagccctgagtagagagagagagattaagtgaatatctctgaacaagaagcaaatacattctaaatcagtgcatactacatatttcatctcctatcctagtagtgttaaagcttccacgcacatttgttttcccggtataaggagacgccgggtagaaaatgatatgtccatgctactgtaggatttcaagtaatgattctttcaccagtaatccccacaagagcattttccatccttgaaatgatgaaaccttttgttatctctgacaatcaattccctccctacaatcctggacatgatcttgatggcattgtgacagtcaccacagacacgaaggttcttgatgattctaagaggtgttcttggtggagtactaataagaccataggcaattgctagacgttcactgtggtaaagcaaggcttgctcttttgcttcctgatcaatgtcatgaagaacatatcttgtgtcaggaacataccctgtttctttcatcccactcaaggccttcaacttttcatcatccttgtaaagagtaggattcttatattcaataattctgttcctgccatcaagcatgtttattgcagtatacttcttcggaggcggcgtggggatcttattggcaacagcttttgatgggtcaagactaacaatcaactcttcagtatagtcttcaagatcaacatctcctgagcgcgagcataatgcttc

SEQ ID NO: 8507 - DNA, 1351 bp, Glycine max
agagcttaggcaaaagtccttttgccttaagtaatttttcactagattttcaaacatgcacacatgtaagtaaattctcagcttattttcgaagggtctgcactatcattgtcatgcactttaaataggggtaaagtgcccccaaacaaattaaataggcccgcttttttttttttttttttgaagctaatatcgacacaaatttatttactgttatgacatcataatcacaagcacctaaataacagtcaccaaaccataaaaagtaaactacttaattcatgaggggacttaaggacaactcaaccagttgtgagacaacaagaagtaatgctttcatttacaattcagatcaaagttaggaggcttgtgataaggcagcacgcctttctagtgcctttaacctattggcttccatacgagctctctgctcttctgttatctcagctcgcctttctagtgccttcaacctatttgcttccatacgagccctctgctcttctgttatctcagctttgccagactggctggatccattatattgaacttcctctgatgtcttttcagctgcgctactttctgaagccttgttagtaccaataacattgtgcatggactgagcatgttcttcagtagctttatcatatatatcattaagcatgtcttcttgaatgtcattaacattttcggattctgcaaacacatctgtctcttgatgagttgctcccccatcttcgtgctcatcagatggaatgtcatgcacaacaggtggttcacgcagttttgttggatctccaccacttgcaactctttctctcaattctctaaggcaagtctttacacgccttgtagcagcaactttctccactttgtgaacaaactgattgaaagagtaataagggagcaagcgagagtgccattcggtgtacagacgaagcaggttacccaaatcgcgaacctcgtggccaccaccacggtatttgaactcgcgagggaagtagcggaggacgtaaccgagaccctcgtcggagaggagaagctccggtgtgagcttgggctttgttcgggggagtttcttgggcttttcggcggcgaatctgggcttgaaagaagaggaagaaggatttggagtatttggattgggagtggtggcggggttagggttagggttagggttagggttaggattggaattgggagcggagaaagggcaatcccgtgaccagtgaccaggtctgccgcacttgtaacaccctgttgcggttccctccatatttttctctgcaacaacgattcacaactctcgcattgcacgatctatgtccgggggggggggggcctacgtagctga

SEQ ID NO: 8508 - DNA, 1482 bp, Glycine max
tcgagtcagctacggtcagctagtaggccccccccctttcaaaagcaaagtgaaagcactttttcagaaaacttgcacttcaattcaatctagtattctatactgctgctactgtataattagcagctagtatctatatataattaaataagtttatactaattcccttattattataaaatggagggtggtttgtggaagaaagagttggttctaaggtttgttgtgcttgctgtggctgttgtgaacacagtgcaatggaatggagaaggcacgcgtgtagggttctattcgagcacatgtccacgtgccgagtccattgtcaggtccacagtggaatcccaccttaggtcagaccctactttagctggtccaatacttaggatgcacttccatgattgctttgtgcgaggttgtgacgcttctgttctcatagccggtgctggcactgagagaacagcggggccaaaccttagtttgagaggatttgatgtcattgacgatgctaaggctaagatcgaggctctgtgccctggtgttgtctcttgtgctgatatccttagccttgctgctcgtgattctgtagttctgagtggtggactaagttggcaagtgcccacaggacgcaaagatggaagggtttcaattggatcagaagccttaactttgcctggtcctaatgataccgtcgcaacccagaaggataagttttcaaacaagggccttaacaccgaagacctcgtcattcttgctggtgggcatacgataggtacaagtgcttgccgatctttcgcagacagaatatacaaccccaatggcactgatccttccatcgacccttcatttcttccatttctgcgacaaatttgcccacaaacacaaccaacgaagcgagtggcactagacacaggaagccaattcaaattcgacacgtcctacttcgctcacctagttagaggccgtggaattctccgttctgatcaggttctttggactgatgcttccacaagaggctttgttcagaaatacttagccacaggtcccttcaaggtccaattcggaaagtctatgatcaagatgagcaacattggtgtcaagaccggttctcagggtgaaattcgcaagatatgttctgctattaattaattaaggcaaatattaatcagtatccttataatattgattaaggaattaaaaaaatatttaaaattatattaatcatcacttaaggatactggttaataagactaattaattaattgcatacttttctgagaggtgccaagattaaacttctatacacctccttaattaaatctatgccagaaaaactttgctttataagtgaataaagcaataattaaaaatattgtggacaatgatataaaaagaaataaaaatcatttaagatctgttaatcgcagaattcgactatgaccgcagaaaagcttgtgaaataaaattattatatttttgttaaaa

SEQ ID NO: 8509 - DNA, 530 bp, Glycine max
ccttgattgctctgatttggcttggaacctttgggctggtttatgtgcttgcatggtcgtgagaagatgatagaaggggacctatataatcaatcaagaaagctccttacagttttttaaaaacgaagagtattactcctcccgtctctccctctccccgcgttcctattattctacattcattcctagttactgtcgaccctgcgtctgacaacgaaggcaatttctccgaaaacggcggtatacaccacactccgctagatacaatagtacccggcggaacaagagtagttttaatgggaaacgaaagacgtttctctatcgcggcgtaactctgtaacgagtctgataaagggaccggaataactactctgcttttacactgaacttgccccactgttgaaggttacttcccgagttccaagcctgacctacccgtagccacaacgtcgcgcgccggaaccttcattgagcggctcgccgcggaggactcattagaaagattccgtcgctaaaacccgcgagaataa

SEQ ID NO: 8510 - DNA, 2052 bp, Glycine max
tgaaagttgaaaaacaatggatggcttgttttgtttttatgatgatgagtagtattatataataatttatgggagcccgcgtccggaaagacaagacaaaacaagagagaatgagtggcggaggaggaggagaagaggaagcaactctggagttcactccgacgtgggttgtggccgccgtttgcacagtcatcgtcgccatatctctcgctgctgagcgcctccttcattatggcggaaagtttctcaaagccaaggaccagaagtcgctctacgaagctctccagaagatcaaagaagagctgatgcttctgggcttcatttccctgcttctcacggttacacaaaacggcattaccaaaatctgcgttcgtcccagtttgacgcgccacatgctcccttgtaatctcgacgccggtgaacactccacgcctgagtccgagtccgccactaaaattggttactgcgtccgcaaggtcacaccctctcactccctcacttttcttttccttagatctcatctaatccaccacccctcgtcctcgccttttgttttgtttttcactttttcagaacaaggtacctttattatctttggaagcacttcaccatcttcacatcttcatttttgtcctcgctgtcgtacacgtctccttttccttactcaccgttgtcttcggaggcgccagaatacgtcagtggaaacactgggaagattcaattgctaaacagaactacgaaactggccgagttctcaaaccaaaggtcactcaggtacaccagcatgattttatcaggggtcgttttgccggttttgacaaagactctgctattgtcggttggttgctatcctttttaaagcagttttatggatctgtgacaaaatcagattatgtgacattgcgacatgggttcattatgacccactgcaggacaaatccaaagtttaattttcacaagtacatgattcgtgccctcgaagatgatttcaagcaagttgttggtataagttggtatctttggctctttgtggttatcttcttgttgcttaacatcaatggttggcatacgtatttctggattgcttttattcccgtcgttcttttacttgctgtgggcactaagctggagcacataataacccaactagctcatgaagtagctgagaagcatgctgccatagaaggtgatttagttgtgcagccatcagatgatcacttttggtttcatcggccccatgttgtcctctttttgattcactttatccttttccaaaatgcctttgagatagcattttttttctggatatgggtcacatatggatttgactcctgtataatgggacaagttcgatacattgttccaaggcttgttattggggtatttattcaggtactatgtagctacagcaccctgccactgtatgcaattgttacgcagatgggaactcactataagagggcaatatttaatgagcatttgcaacaaaacattgttggttgggcacagaaggcgaagaagaggaaaggactaaaagctgatggcaatcctggccaaggaagttctcaggagagtgctaatacaggaatccagcttgggtcaattttcaagaaggcatctgctccaggaggcagttcttctgccaccaaagctgatgggaccaactcagtgtagcctatagaagtgaagatttacagtcttattttgtaaagttgctcacaaattgcagttttctttatattattttgtttgctaacagtgtagcattgtgggacatgtgtttgacttggtgtaggcgtaaggtcgaagttctatatgagtagatgctagtaatgccattggcatttctaacttctaagattcgtcatcacctccttactacactcgtcctccctcaggtttttgcctctgatacttccgtagacaggctgacactgcctttctctctaacttgagttcctgttaaaattatgtgtcttttatttaatgtaaagttaagctactttaggttgataaagttcaagacaaacttggtaaaaaaaaaaaaaaaaa

SEQ ID NO: 8511 - DNA, 1737 bp, Glycine max
atcaatcttaagacttccactaatcatacagagattattcaacttattacaattcacaaaagccataaaaatacatttggcccacgaagctttttttttttttttttccaaccagtccgagacaccaataaacttttcatttcttaaatgagagagcaataatctagaatgaccaataacttcataactatactacctcacaagttcagtgagactgaaggaaaaataaaatctaaagctagcgaatggtgtactgaaggatttaaatctaaaaagaaaaaaggaaacttcgacaaaggtatgaccaaattgaatattctcaacatgaagaatcattttgggacttagtagcagcttgtgcatgtcttgtctttgaatcatcaagataattctgataaatataagaggcaaaaccccatagagccaaaagcatagaaattatcttcaccccattcatcttatcatgaaaaactataacagcagcaataggagttacggctaaagaaactgtgcttataacattggagtagagagaagacactaggaagatcaagccaacaacaccaacagagcatacctgccaggctattgaagtccaaaccaaagtcataacataagcaacatatcctttctgaaaaccctccatttctccatgcaaagtacgccattccccacttgcaaataggcctatgacagaagcaccagaggcaacgaatgatgtgtagatttgcatttccaaaacaacagaaaatgtttccttcttcagaaccttctcaaaggtcagctgcatgagggaaagcaaaagagagtacactgcagaagctccaagggtacataggaaaccaataatgtactttcccttggagaaaccagatggttcatctgtgtcttcgttaacagcaaggagtgcagcagataaagtgagaaccactgtagagtttataatcaaggcagtgaacttttgagaattgataaaatatgagaaaactgcattaaaagctaactgtgatgcacaaatcagcgaataggtagaagccgagaggtataagagtccagtggagtacatcatattgtcagcagcaattaagactccaagaccaaaatatatcaaaagaataattttgatgggaggtgaagcagaagttgaagcctctggaggtgaaggaattgtaaataatggaatgaacaagatcgggaaggcagcagtttgaactagagtagccatccatttactatttccaccctgatcataataaaatcttccaaggataacagcagcagattggccaactataagaaaggctatgctgagtgtcacaagacaccaccattgccatcgcttatatttattaaacgctaattcagacatcgatccaggtacgatcatcggttcttcattatccgtcatgttgttgagaagctttggggcgatgacgagaaggagttaagagagagaaaggttttcaattttgactttttgaggaaggtttaagggaagaacatgaccatcaatgaatgaacatgcgatggtatttaagttgtgatgaaattgaatcgaataagattcaaaggtttagatagggagtggaaaatggcaattctcattgttctcgcacgtgacacggtcgaacaaaagagaagaaagccaacttaagatttgttgttgttgtcttgtgttcttttggattctccctctcccttctttggaatcggaaggcgtgggccgaccgggaaatc

SEQ ID NO: 8512 - DNA, 1304 bp, Glycine max
aattatcgccttatagttagttgattgatggttcatttggatcagcgtgtgtagttggggggataaagagtggaggcttcaatccatgcaacacaattcacaaatttcataaatattgaaccaaaaaataacaaatcatgtaattgtattcacaaatccaaacaaaacctccaccctaataactttttccaactgttctctttttttttttttttctttaaattttatcactcccccacttgagtaatgagtcagaatccctatccattttttacactgtggcactgtccacccctttttgggttattatttctaatttttataataacttctagccactgccacacagagtgtatttttaaaaaaaaaagagcaaaaccgcaatgcatcccacgtcagcatcacgcattagttgaccaacaactgctctccacgtgtgcactgtgtgccacttgacttcccacttgctcctttctcaatccactttgagccgtcaccgtggaccccaccaccttcttccgcctcttcgtcgacgacgcactatccgacgaagaagacgacggctccggcgaatacctctttgccgtgacccgaaccggttcgggctcgcctgaattaatccggagcgggaaattcaacaaagcgcgcgagccgcgcattcggtacgcggctcggtcgtaagccagcgcggcgtcctcagccgtttcgaacgttcccagccaaacccgagccccgtttttagccgggtcgcggatctccgccgcgaatttcccccacggccgctgccgaacgccgcggtagtgcttccccttcgccggaaccaccgccggctcagccttctgagccgccggaggaatatagacaggctctggcgccggaaatagatccggttcggatttcacggtcaccgccgggatgaaacccgacgagaaactctccggtgaggatgcatcgagagatgggacccaccctgcgtttattgcatcgcgaagaacaccgtaaagaagcatgtcttctgaatcgtcttccttaagaggaagttctccccaatcgttactcaagcaagggtacaacctgctgaaacaggagctccgagagtacgctggagtgttacccgaactaacattcggggctccgaatttgtgctcctcggagtcgccaagtaagtggcggcgaatggagtccaaaagggccaaatcggactcatagctactttgtccgtacatttcgtggtatgtttcttcttcttaatgtttgtgtcgtgtttggagaagagaatgagcgcgagccccaatgagtaacga

SEQ ID NO: 8513 - DNA, 1067 bp, Glycine max
aataaagaaggtagctgattatatatatatatatatcaaaagttaccaaataaatattactagaaacaacttaataaagaaggtagctgatagagtgatagtgtatgtttggaaaatggttcgttccaacgcaaacatacattatattcaacgaaacactggtgttgcttctccgttttctctcttgaaatgtgcaaataaacgtttttggtgattcatatggtaatccaaacacactatgcatcagtggattaggctttgcactccacttctcccacatttgtcatcaatgatgacagtacattctaactgcgtccaatagtctcaggtgggtttggaggaggcaaaaacagctccatagtcatttttatgtatcaaccaaactcccaacttgtcagggactcagaaaccttcggtaagcgcaaaagttcgaccagataaactgggaggcaatgcacttacagcgtgttgaatttcctctactgtgtaacgagccgaaaagtgaatcaaaaggattgctctgttctgtaaactctcagcataacttattatctcggacagatgagtgtgtccataatctctggcatgttccacagtgattgaattgttaacaaaggtgcactccaatacaagaattctagcccgtaagacatctgtgttattttcatcaactatgaaatctgacatggtatctcccgtgaaagcaatttctggttctgtcaaagtgtacgttatctgccaagaacccagcttggttgcatttaaaaccaaaagatatagatgtaacttctatcccaaaattcaatgtaaatggtgcataggctacaaatttattttttaagaacaattaattaataattaaaaagttacaaaaaaatcaatttaaattatatgatttagcatatccacggcagaaatattcagcaacagacaactttatttgctgtgtacagcaagaaaatgagaccaaacttaaaactgctattttttcagaactaatattgcacgagatctgaagtttaagagagctaaaacaattggggggggggcctacgtagctgactcga

SEQ ID NO: 8514 - DNA, 1756 bp, Glycine max
aattcggctcgagcagattaatagtccgcgtcataggccccccccccctcgacaattccaaagtcttagcaacctgcagccgctacaactaaaaaagccctttgctttcttttccactcctcacattggctcttttatcactatcagatttagggtcccttctgccatactgcacacgttgaagatggcagcaacatcattttctggcatgcaatttgcaatgtcaagatcatgcattcctgcatcacaaaagattgcagatgctggtgccgtggttcttggcggcaagtccaagattggatcgtggaataaacttgcaagtgcatgtcatattgcatcagtgcaacctttcaggcggggcttcacttcatcgtccataaaatctgttaaaagtgacacaaaggccttgtttgagttcagtgcacaaagtgcagactcaggattgtcaattgatctgaaaggtaaaagggcttttattgctggtgttgctgatgacaatggatatggatgggcaattgcaaaagctcttgctgcagcaggagctgagatccttgttggcacatgggtacctgccctgaatatttttgagtccagcctacggcgtggaaagtttgacatatcacgcatattaccagatggctcgatgatggagattaccaaagtttatccattggatgcagtttttgacaatcccgatgatgtgcctgaagatataaaaacaaacaagcgctatgccggatcatctaaatggacggttcaggaagttgctgaatctgttaaggaagactttggcagtatagatatccttgtgcactcacttgccaatggaccagaggtgaccaaaccattgttggagacatctcggaatgggtatcttgctgcaatatctgcatctagttactcatatgtttctttactcaagcattttcttccaatcttgaacccaggtggatcttcaatctctctgacatacattgcttcagaaaggatcattcctggatatggtggtggtatgagttctgccaaagctgcactggagagtgatacacgagttcttgctttcgaagcaggaagaaagcgcaaaattagagtcaatactatatccgctggtccactgagaagtcgggctgcaaaggctattggattcattgatatgatgatcgattactcatcagccaatgcacctctacagaaagaactatcagcagaggaggtgggctacacagctgccttcttagcatcacctttggcatctgctatcactggtactgttctatatgttgacaatggtctgaatgctatgggtgttggagttgacagtccaatatttaaagatcttaacattcccaaggaccagcattaagtggtagctaccccacaaaagctagtgtcaccggaattagcatagcaatggagatatttttgtttcactgtagccatcctcaaattctgcggctcctaccttcttcccaacaagacagtgcaggatccactttgagcatttactttgctttttgtaggctatttttcagtgtttccggcagacttttaaatatttctttttgcaatgtactcagaagtgcaggccatatgattatgaatgtaagagaatctttacattgatctatgcttatttgagatgtacactcgcaataaaactgtattcccgtgtgccctttatcctgtggtaagaaccttgtgagttgtgacatagaaattgatcttgtcaaaaaaaaagaaaaaaaaaaaaaaaaaa

SEQ ID NO: 8515 - DNA, 2129 bp, Glycine max
caacatatcacaacactcatctccttccttccttgctagttcttgttcaactgcctgcccctccgatcccataatcctatgaaatgacaccctttcagctacgtaggccccccccccataacgttgtttttcaattaacaaagcaaaacattgttgctcgccacaaccactagaatgtcgtgtttgttgccgcacttcaactgccacctcgacactttcaggactcatccctatgctcttcctacccatccatcaaaaacaagactaaatttgtgtttccagccgcaatgtgtgttgtctgccacatctccttcaacgctgcttagtttggaaaagaagttggcattagatgctccttctgatccaaacacgtcttggccctatatcgctgctgttgcccctccctcaccacacttaaaggccaactttaaatcaaccttatctgcggaatcacttcttactaatgaagaggctgtaatagctgctgctgcatctgaagctcttgctcttgctaaagcagctgtgaaggttgcaaaggatgcagttttactagtaaaaaagaagcctccagcagaagcagagtataaatcccatgtttcttccaaatctgatgatttacttctcaaatggtttcatcaaatggaagcggaagatggtgtagcagaagagtccatgggtgctggagcagaaataatggaaggtgttgacataagccccagcgaagaggaatctgatctagagccttcccatgaggaacttgagtgtctgcaggaacggctttcagacaatatagctgtaagatctaggcgcctaacagaaagaaaagctaaaagagtcagagcagcagagaaggctaccacgaattttgcatctttaaaacctggctcctccagcaggagaaagcgtgtttctatgcaagaagtagattattcagatccacttcgttacttaagaacaacgactagcgcttctaggcttcttactccaactgaagaaattaagttgtcagcaggaatacaggaccttctaaagcttgaaaaaatccaggaggatcttgcagaaagatttggtgatcaacccacgtttgctcaatgggcagcagtggcaggggtagatcagaagacacttaggaaacgtttaaattatggtatattttgcaaagacaaaatgattaaaagcaatatacgacttgtcatatcgattgctaagaattatcagggatctgggatgaatctgcaagatcttgtccaggaaggatgcagaggccttgtaaaaggtgcagagaagtttgatggtaccaagggttttaaattctccacctatgctcattggtggattaaacaggctgttcggaaatcactttctgatcagtcaagaactattcgcttgccattccacatggtggaggcgacttacagagtgaaggaggccagaaaacaactgtatagtgaaaatggaagacagcctgatgatgaagaagttgctgaagcaactgggttgtcaatgaagaggcttaatgctgtacttatgaccccaaaagctcccagatctctggaacaaaagattgggatcaaccagaatcttaaaccctcagaagtaatttctgatcctgatgccgaaacagctgaagaacagctccttaagcagttcatgaagaaggacctagaagaggctctggacagtctcaatgcaagagagaggcaggtggtaagatggagatttggtatggatgatggaaggacgaagaccctgcaagagataggggagatgttgggtgtgagtagggagagaattaggcaaatcgagtcaagtgcttttaagaagcttaagaacaagaagagaaccaatcatttgcagcagtatttggtttcataaccctaccaaatattgatattgaaccattgtatgagtttgcttatttgatacttgtgaggttctaatctctgttgatcttcgtctgtatgttcttcctccattttttccccccattctccaaaagagaagagaacattatttttagtgtactaggaaatggatgtacacacaatggaataacttgactaggagtccatcatttttaacgtacgtgaatgcgaaaattgtttcagcaaaaaaaaaaaaaagaaaag

SEQ ID NO: 8516 - DNA, 1631 bp, Glycine max
ccccgcgtccgaaaccctacaagtacgtaggcccccccccccaagaccctctctctctcgtacttcatcggaaccgaaacccttcgccgcaaaaaatgcctcccaaatctgccaaatccaaggaagctccagctgagcgacccatcctcggtcgattctcttctcacctcaaaattggcattgttggcttgccaaatgttggaaagtctactctctttaatactctcaccaagttggcaatacctgctgagaacttccccttttgcaccattgagcctaatgaggcacgggtcaatgtacccgatgaacggttcgagtggctttgccaattattcaagccaaaaagtgaggtctcggctttcttagaaatccatgacatagctggattggtccgaggtgctcatcaggggcaaggattggggaatagttttttatctcacatccgtgctgtagatggcattttccatgttttacgtgcatttgaggatccggacattattcacgttgatgatactgttgacccagtcagggatttagaggtcattactgaagaattgcggctgaaggatattgaattcatggaaagaaagatagaagatattgagaaaagcatgaagaggagcaatgacaaacagttaaaaatcgagcttgaatgttgtcaaagggtgaaggcattgcttgaggaaggaaaagatatacgtctaggggattggaaggctgctgatattgaaattttgaattcctttcagttgctgactgccaagcctgttgtatacttggttaatatgacagaaaaagattaccaaagaaaaaagaacaagtttctgcccaaaattcatgcatgggtccaagagcacggtggtgagactattattcctttcagctgtgccttggaaaggaatcttgcagatatgccaccagatgaagctgctaagtattgtgaggagaacaaaacacaaagtgctcttaccaaaataataaagactggattttcagctattaatctcatttactttttcactgcaggacctgatgaggttaagtgttggcaaattcgacgccaaacaaaggctccccaagctgcaggggctatccatactgattttgaaagaggatttatttgtgctgaggtgatgaagtttgaggatctaaaggaacttggtagtgagtcagctgtgaaggctgctggaaagtataaacaggaagggaaaacgtatgtggtccaagatggagacattatattctttaagttcaacgtttctggtgggggcaagaagtaaatccagcgattcatctcaaatagcagagctggttttgcatggagtttgttttattataggtgcctaccatattgcacaatttgtagaagtttgaaaatgtaatttttggaccattttcaatattatttacttatttaggcttattaatatctctagtggattttgacctctcacctatttccatgatttattatctatgctatgctacatcttatagcggttttgaatgtgaatgttgataagttgatgcttttgtatgttgggtcaattaatttaataatacatgggtgcattcacgcaaaaaaaaaaaaaaaaaaaaaaaaaaaaaaaaaaaaaaaaaaaaagaaagag

SEQ ID NO: 8517 - DNA, 830 bp, Glycine max
  misc_feature (594)..(594): n is a, c, g, or t
  misc_feature (656)..(657): n is a, c, g, or t
  misc_feature (739)..(739): n is a, c, g, or t
  misc_feature (759)..(759): n is a, c, g, or t
  misc_feature (765)..(765): n is a, c, g, or t
  misc_feature (791)..(791): n is a, c, g, or t
  misc_feature (808)..(808): n is a, c, g, or t
  misc_feature (820)..(820): n is a, c, g, or t
  misc_feature (823)..(823): n is a, c, g, or t
  misc_feature (827)..(827): n is a, c, g, or t
ttcggctgcgagaagacgacagaaggggggctttcccttcatacaaaaccctacaaggcacggacttgagatttctaagaccctctctctctcgtacttcatcggaaccgaaacccttcgccgcaaaaaatgcctcccaaatctgccaaatccaaggaagctccagctgagcgacccatcctcggtcgattctcttctcacctcaaaattggcattgttggcttgccaaatgttggaaagtctactctctttaatactctcaccaagttggcaatacctgctgagaacttccccttttgcaccattgagcctaatgaggcacgggtcaatgtacccgatgaacggttcgagtggctttgccaattattcaagccaaaaagtgaggtctcggctttcttagaaatccatgacatagctggattggtccgaggtgctcatcaggggcaaggattggggaatagttttttatctcacatccgtgctgtggatggcattttccatgttctacgtgcatttgaggatccggacattattcatgttgatgatactgttgatccagtcagggatttagaggtcattactgaagaattgcgngctgaaggatattgaattcatggaaagaaagatagaagatattgagaaaagcatgaagaggnnagcaatgacaagcagctaaaaatcgagctccgaatggtgtcaaagggggtgaaggcattgcttcatgctgaggaggaaagantcgctagggattgagctctntatgantttgatcttcatgcactccactgtgntctgtatagcgaaagtncaggaaaaacantcnccantcc

SEQ ID NO: 8518 - DNA, 1725 bp, Glycine max
  misc_feature (5)..(6): n is a, c, g, or t
ttttnntctgtaggtgtgttgaataaaataaagggtaagaatcccggttcctttgtgtccgagtttctaatctatactccaatgtgcgcgattagtggtctccacactccatgcactaacaacagtcctaacttcatccccttctcgcattaataatacaaggaagcggatcataatgtgcttttttttttttttttgtgtgaaactagcatatgatatcataatcatcgggatgaaactcctgccaattacatatttgggcaatgtaaaaaaacccacatagaaggacaatagcttattacaaaatacgaacaaagacaaaataagatgctagagcacacatataatccaactatgctttcctcattcggtatctcgcttgaaactagattcagcattcttctccttcgtgccatcatccactattttagtttcagcaagaccatccccctcgcccccagttgcattgactttaagagtgttagacttttgaggaagctttcgatccagattctgagcagcttcagattcatcacttttgggtacttcattgggattttgaacagcttcggcatcatgcttgtcagtgtcagcattttgaggttgttgtgccccataactttgagcagcttctaactcctcatatttagaaactacctgctgcagctcatcattgagatataaagcctcaaaaagtgtcgcttcatcgtttgtagtgctttccgcaatccccttgatgatagagagtgattgcttgcacttatccaacaagctcatagttaaatcttccttcaaaggttttggctctgcctcagaattcaatatgcttgagagcaattcaagactgtttcgagcaaccacgagattctctttcctctcctcaactgatgtgtgttggtaattagaagagaaagctgctggatcatcaatatcgtgtagttcagcttcgggaattgggtatctttcagggggatctacaggatattgatgcgcatatgactcggaggcatacggaacaggtggtgaatttcctcctgccatgtcaagtggttcatcccttcctttcaaacacatataagtttgacgaaagacggggagatatgcgagatcctcggactcgccccaggcccgaatcaactgaaaagcccgactgcgagtctggtgctgggcctgcgggttatcaatcaagcgaatcatctcatcgagaaccttctcggaagcgatttcggagaagaccttgtcgcaattcatggcacaggcttcgaggaggtcgaggctgagagcctgaaccacggggctcttgtggttgatctttctcttgatggccttcacgacctcggagccgttgaattggtcgctgttgatcatgctgcagattctgagattcatgccccaattaggttcttccattgtctccagcgtggcctcgtccaccatcttcgactccggcgtcggcgcctgaagcatctccttcacttttccgctcaccattcgccccatctgggccccacccatcttcagcctctcccccagttgagcccacttcaaccgctccatcgcgaaaactaatgaaagaaaaccaacgggaaatgtttttttgttgttgtgtaacgaacctgggatgtttgtttttgggaacactaactagatcgggtgaaatgtgtggaaagtgaagagctgagctttgaagatgataaaggtgaacacgaaacagagagaaaaaaa

SEQ ID NO: 8519 - DNA, 1963 bp, Glycine max
ggctcgaggctttgctttgcgcaccgtttcgtttcgtttcgtttcactatttttttcagatatttagacgaaaacaagaatccgcattctgattctgaagattcatgtctaatctcatttctttcttcccttggttggagctcgttttttaggagctcagcagttgatggactgttaccccaagagcagtgacaagaaaacattaaagaggtggttttttattgataaaagagttgggtgaagtggaaatctgataaatattattttgattggtactctatactccttaaagttcttacattgttgctggactgtaaattgatttaaaatctggatcccatggacttgaagtcgaatcatactcctgttctcactgatgctgcacctgtaacaaagtctagactgggtgtgcattccagtttgttgccttactcccatgctgggacaacctttacacatggaatgttattgactatcccgaggaagaagacaggaattcttgaagatgttcgttctagtggttggttggatgccatgaaatcatcttcacctccagccaggaagataacaaaggatgttggccatgggtttgcatcatctgattctgaaactgctggtgcttattttagctggctgctaaaatacccatccgcacttgcatcttttgatcaaatcatgaactatgcaaaagggaaaagaattgcgctgtttatggattatgatggaactctttcaccaattgtggataatcctgactgtgctttcatgtccgacaatatgcgtgctgctgttaaaaaggtggcagaatattttccaacagcaataattagtggaagaagccgtgataaggtatatcaatttgtaggactaacagaactctattatgctggtagtcatggaatggacatcattgggcctgttagacaatctgtatctgataatcacccaaattgcattaggtctacagacaagcagggtaaggaagtaaatttattccaacctgctgctgaatttctgcccatgattaatgaggtacttaattctcttgaagagtgtacgaaagacattaaaggagctaaagttgagaacaataaattttgtgtatctgtgcactaccggaatgtagatgaaaagtattggaattgggtggggcaacgtgttcatgatgttctgaagggctatccacgtttgcgcttaactcatgggcggaaggttttagagatccgacctgtgattaactgggataagggcaaagctgtcacgtttctacttgagtcacttgggctaaacaattgtgatgatgtgcttcctatatatattggagatgatcggacagacgaagatgcatttaaggttttgagagagggaaataaaggttatgggatcttggtgtcttcagcaccaaaagaaagcaacgcaatttactctcttcgtgatccatcagaggtcatggaatttctcaagtcacttgtgttgtggaaatcaagcaccttaaaaagccttatatagtgtatagagggagagaatatactctgctatactatactatatcataaaaaaaaaaaacagattttttcgattttggtttttctcggaaacattccaagaggtttcctggagccagatttacgcacagaagaacctcttttggtaacaacagcgctgtcgctacccagttgttttgctcaaagctcctgtggtagctgtaaattcgtcgctcataattataaatatctcaaagaattaaagaaaaagctgcggtgtttcgttgtttttttccttctctcattacaaatgtattgatatttaatcattgatgtttcagttttgatcactatatctaaccactaaaacgggagtcacacatgcgaaatcattcatttgttaagtcattttgcatgtagtttgactgtttgaataatataatttatgatagcttttgatgagataaaaaaaaaaaaaa

SEQ ID NO: 8520 - DNA, 854 bp, Glycine max
tacttcattgtcttgtctttcctttgtttctttcccatcatagtattattatatctcttcctcactttctatttttttttttttttttttctttctgtgacttattttcatccttcccagtaacccccaacatggaatgcatctatggcatttccaattccacaataagtgggataggctccttgtgaaagcagctttgttggatgtcaaagaagccatcaatatgtttagtgcctgtgacttcctgattttcaccaaatgttcctccaaatcatccaacaaccggtcattctccataaatggacatggaatgcttgaagaagtcgtcattgctttcacttccagattatcgctaacaacaaaaagacatggcctcttcataaatcccacatcagattttcttgctctatctgaggatcttgggtccaaaagtttgatatcttttggatcttttagcatatcttttttctttgaaatcatattcttttcatagatgatacgtcccctattatccttcactatgccagtgccataccaatacttgccagtgtcttcttctgaagcatttagtggattgctcccacaaccaaaatgacgagcaacctttggattaagtaaggatttggttgaggacgctatgaaccatgatggatcgagattcttcacacttgtgtacaacttatcaatgcttcccaaagataacttgccattcacaaggtacataatagatccaagtggcattgtaaggaaactgactagaaaatcaacaaaatctccatctgcttcgacaaacagaatcttgttctgtgatttgctcactattaccttgatttttatgtaatctttccgttgac

SEQ ID NO: 8521 - DNA, 1808 bp, Glycine max
ttatctgtaatatttcgagtccaagcttctcttggtgctctgtaagggaccaaaaaccaatttcatccactcgtaacatacccctatcggttttagaaaagccaagaaagtttgtgtccaccaacctctattttacacgagtctctcatactatgatactatagctacacttcccactgtgtctcagggtctgtgacacacacagactcacttcaagttcccagcttttgccatttttcccactgtttattgagaagaactgcagaacatggcacagattttggctccctctacgcaatggcagatgagaatctcaaaatcctctcccaatgcaactcccattacatcaaacatgtggagttctttattgtggaaacaaaataagaaagtttcacctaccagttctgctaaatttagagtgctggcaattaagtctgacaatagcaccatcaacaggctcgagggtctacttaatttggatatcactccattcactgacaagataattgctgagtacatttggattggggggacaggaattgatgtgcgcagtaaatcaagaacaatatcaaagcctgttgaagatccctctgagctccctaaatggaactatgatggatctagcactggacaggcacctggtgatgatagtgaagtaatcctatatcctcaagcaattttcaaagatcctttccgtggcggtaacaatattttggtcatttgcgattcttacaccccacaaggtgagcctatccctacaaacaagagacacagagctgctgaaattttcagtaacccaaaggtccaagctgaagttccatggtatggaatagaacaagagtacaccttacttcaaacaaatgtgaaatggccattaggatggccggttggtggctatcccggtcctcagggtccttattattgcagtgctggggcagataagtcatttggacgtgacatatctgatgctcattacaaggcttgcttatatgctggaattaacatcagtggcaccaatggggaggttatgcctgggcagtgggagtaccaagttggtcctagtgtaggtattgaggctggtgatcatatctgggcttcaaggtacatcctcgagagaattactgagcaagctggtgttgtgctctctcttgatccaaaaccaatagagggtgactggaatggagcaggatgccacaccaattacagtacaaagagcatgagggaagatggaggctttgaggtaataaagaaggcaattttgaatctatcgctacgccacaaggatcacatcagtgcatatggagaaggaaatgagagaaggttgacaggaaagcatgagacagcaagcattaacacattttcttggggagtggctaaccgtggttgctcaatccgtgtgggaagagacacagagaagaatggcaaaggttacttggaagacaggcgaccggcttcaaacatggatccatatgttgtgacatcattacttgcagagactacactattgtgggagccaactctggaggctgaagctcttgcagctcagaagttagcattgaaggtctaaacctattgaatgatggcattctggatgcaaaatcactttccttttagattatctatatgtattctaatgatcttgtttggactaaagaggttgccatgcccagttattggttatcatatgaaatgcacattgtatatcagaagtttggttggtactatttgcttcaggacaaattttctttgatgcttggttaaaaaaaaaaaaaaaaaaaaagagactagttcgctcaaaaaaaaaaaaa

SEQ ID NO: 8522 - DNA, 1412 bp, Glycine max
ctgcgtttcccacgtctaacaataatttatacaatatgattatatgcaccatgttaatattataatatatcgctgggacagtttttgtttgacagcacagcactcggaaatttctggcgatctctgcgttttcccctattttttctgaatctaacaacaaacatccctcaggcaacaatcatcactattcagctaagagccgcccagcccccccccccaagccaaagaaaggaacaagaacaagaacaacaaagtaacgtgaaagagagagagatggaggcgattgttccagtggtggatttccagaggctttcagaggaagaggagcgcaagaagctgagaaaaacatgtgagaaaccagggtgtttcagaatcatcaaccactcaattccactaacactcatggctgacatgaagtcagtggttaaatacttgcatgaccttcccacggaaatcaaaatgcgcaacaaaccctccgtccctgagagtggctatagggcggcaatgccaacaagtcctctatacgagggcatgggaatatatgacatgcatgcctcaccacaagcatttgaagatttctgctccaacttgaatgtgtcaccccgtcacaggcaaataataaaggaatatggtcaagcaattcatgacttggcatcaaatttatcacaaaaaatggctgagtctttgggtataatggataatgatttcaaggactggccattcattttgaggactattaaatatagttttaccccagatgttataggctccacgggagcacaattgcactcagatacaggatttatcactctacttcaagatgatgaacatgttagtggtcttgagatgatggatgattttggctcatttaaggcagttcctcccataccaggggccttcctttgcattgttggagatgttggacatgtttggagcaatggaaaattttggaatgccagacatcgtgtaatatgcaaggaaacgggtactcgttattcatttggtgcatttatgttatcaccaagggatggtaatgttgaggccccaaaaaaattggtggaagttgaccatgtacaacgctatcgaccatttaagtacgaagatttgagggatttcagaatcaccacaggaaagagggatggcgaagtccttgatcaatatcgcatttgttagtcattttatgcatcgaaatacatcgccaatagaactttattttgaaaaataagttggcgataaaataaatgttgcatccattctaaataatttaaatagtttggtgtccttgttcgttcatgaatcctaattcgtcgtgttttaatttggatcatgttattgtattttgttctagttgagttgtgttactattgaaaaaaaaactaaaaaaaactcgagactagttctctccctcgtgc

SEQ ID NO: 8523 - DNA, 1296 bp, Glycine max
tcagctacgtaggccccccccccccccccaagaccaacaaagtaacgtgaaagagaaagagatggaggaaattgttccagtggtggatttccagaggctttcagaggaagaggagcgcaagaagctgagaaaaacatgtgagaaaccagggtgtttcagaatcatcaaccactcaattccactaacactcatggctgacatgaagtcagtggttaaatacttgcatgaccttcccgcggaaatcaaaatgcgcaacaaaccctcctccgtccctgagagtggctatagggcggcatcgccaacaagtcctctatacgagggcatgggaatatatgacatgcatgcatcaccacaagcatttgaagatttctgctccaacttgaatgtgtcaccccgtcacaggcaaataataaaggaatatggtcaagcaattcatgacttggcatcaaatgtatcccaaaaaatggctgagtctttgggtatagtcgataatgatttcaaggactggccattcattttgaggactattaaatttagttttaccccagatgttataggctccatggcagcacaattgcactcagatacaggatttatcactctacttcaagatgatgaacatgttagtggtcttgagatgatagatgattttggcacatttaaggcagttcctcccataccaggggccttcctttgcattgttggagatgttggacatgtttggagcaatggaaatttttggaatgctagacatcgtgtaatatgcaaggaaacgggtactggttattcatttggtgcatatatgttatcaccaagggatggtaatgttgaggcgcctaaaaaattggtggaagttgaccatgtacaacgctatcgaccatttaagtacgaagatttgagggatttcaaaatcaccacaggaaagagagttgaagtccttgatcaatatcgcatttgttagtcattttatgcatcgaaatacatcgccaatagaactttatttgaaaaataagctggcgaaaaaataaatgttgcatccattctaaataatttagatagtttggtgtctttgttcgctcatgaatcctaattcgttgtgttttaatttggatcatgttattgcatttagttctactttaaaaaaaaaaaaaaactattgatatgctagctgtagaccaagaaaagtctatatatgcagcaggttatgtgatgaatttgagtgtgatcattaaagccgccatggttgatatcttgaaacaaaatatttaataagagtccttagatttattattcacc

SEQ ID NO: 8524 - DNA, 1542 bp, Glycine max
  misc_feature (2)..(5): n is a, c, g, or t
tnnnntctctaaaacgaagaggaaggaacttttttttttttttttggttgattcatgaacagtaccaactcaatttaagttattccaactttaaatacaaacttccctgtaggtaggactagaacaagatgataggtactatttcaaacattagtgaaaaaataataggtatttttacaaacgtgaagacatcctgtcatacaaattaacttgggggagtaaaatccatctctgtacttttcattctgtcagttccaacaagtgatatcctgtcatcatagacatcaatgtatccaaatgcatccgtaccaggagggcattccaaagcagcttcaaaaactctatggtgtatcccatgagaatcaatagagtatccgcctttatgatcatgccctgcaagacagaccttaacgcaattgtatctgtgtatcaaattcattacttcatcgtaattccacaacagtgtctcttcagttgccgcaccaggatgtagaggcagatggcagcagacaaccaccttctgtttcaagtttgttgactccaagagaacaccatctaaccattcgacctgttcctttccaacagctccattaaacattacaaaccttcgttcaggaccctccaaatttgttggactgttcttatcttcatttggattcttctcccttaggattttcaaggcctccagtgtttttggatgatcttgaggccaaccaatggcactgatgtcataggcatccagaacaacaaatctatattcaggcactggcgagaaatcatagtatgcacggccatcaagagtatggatcttcagtaatgaaggtaacttgctgcgaggaagattgtataggcagtgattgccaatcatatgatacacaggtcctcctgtgaacatctcaaattcatcaacaactttctttacagtatcaagagattgatctttgggacaaaacccatcaacaaaatctccaaaattaatcacaaacttgtgcttctgatgagtgttccattctttaactgctctctgcaatatgagaagactgtgtctataataccgtggaacaccaaggaatgaacggccatcaggaatgtcagcatattggacatcagaaatcaatccaaaagaaaaaagtggctgactcgtagctagtccattagaagagaccatgatgtctctctctctctatgtgccccggtgttaagtagtgatttgaaacggcgaaatgtgttgttgtgaacgtttgttgaaaacagagacacatcaaaatgaatggaattggcctcgtcaaggttaggacttaggaagaagccaaagaaggtactcccttccatctcataatcatattcattgaccttttaacattaaaaataaaaaataaaaaattctctggtgcctgtatattttaaaggatattgatatttttttaagtaaatcaataaagatttgcccattcttagttctttttctatcagagagaaaggaaacaaaaacagctaactcccatggcatcaccaaaacaagggcaagaatcccaaagaaat

SEQ ID NO: 8525 - DNA, 1219 bp, Glycine max
tacggctgcgagaagacgacagaaggggacacctctttctccttctccccagttctcaaaccttacctagtattttcgtttctgaacccaattaattaagcacacaaggaccataacatacctatacctcaatatcacaagtcttatggaggcagagcgagacaagtacaagatgatcaactttgaagaaaccgagttacgactcggcctcccactcagtggaaacgagacgctcaaaaccacttgcagcactgggaagagggttttttcggatactgccgtggatttgaagcttaacctttcctcaacctcaaacagtgcttcttctgacctgactaaagagaagaacatcactgctgctgcacctcctgctaacgacccagcaaagccacctgcaaaggcacaagtggtggggtggccaccagtgaggtctttcagaaagaacattgttcaaaggagtaacaacaatgagggcgaaaaagccgccacaagtagtagcaacaatgtgaacacgggagcagctttcgtgaaggtgagcatggatggtgctccttatttacgcaaggtggatttgaagttgtacaagagctaccaagagttgttggatgcgctggctaaaatgttcagttcattcaccattgacaagtgtggatcccaaggcatgaaagacttcatgaacgagagcaaattgattgatcttctcaacggctctgattacgtaccaacctatgaagacaaagatgctgactggatgctcgttggtgacgtaccgtgggaaatgttcgtggaatcatgcaagcgcctgcgtataatgaaaggatctgaggcaatcgggctagcaccaagagcagtggaaaagtgcaagaacagaagctagagtcaaatttgtaaattccactttcgacaacaatctgctctatctgttgctcttgggcgtccacggaaagcattaatgctaatttctcgagcaaggggtagtctaatataggagccaagttgttacataatgtgtcggtaccatttcttagaaataattttcttgtatatgtattgtgtattttatatatgtgagaaaatatataatttggaaattagggacaagaaataatgaagtatgttttatatatgtgagcccgtttttgtttctaagtaccaaacgttacgttgtctatcgttggtgtgcttgtctaataagaataatgtctacgtttatagctgt

SEQ ID NO: 8526 - DNA, 1326 bp, Glycine max
cacacctccccttcccctcccaattcccatgacaggtgtctgtttgccttgttcctgatttaagccataatagccacacagagagagagagagagagaaagaaggcatgagaaaatgaatgatctccatcatcattcccttccccatgtgatgtgccacccctctctctagggttttcaattccaatttcaatccaacccaacacaaagctcccacctttcccattcattcgcacaattcccttcgcccttttccttttcagccaaaagggtctccggggcttcgcctctctttgaccgttccgggctcgcctccccaggcttcttgagagagagagagagagagagagagaaaactgcttttctagtgagagaaagtcaccatgggaatgtagagtggagcttcttcccttgttgtttttgttgttggtggtgaccgagcaatgttggaaacggagaaggattttgattccaagctgaagattcaggggaattcctcatcttccaatggtggtgggaatgtacagagatccaaaagctttgcttttagggctccccaggagaattacaccatccaggactttgaattgggcaagatctacggtgttggctcttattctaaggttgtgagggcaaagaagaaggacactggaactgtgtatgcattgaagatcatggacaaaaaatttattaccaaagagaataaaacagcttatgtgaagttggaacgcattgtgctagatcaattggatcatccaggcattgtgcggttatatttcacatttcaagactcattttctctatacatggctcttgaatcctgtgaaggtggagaactttttgatcaaataaccaggaaaggtcgtctatcagaggatgaggcacgattctatgcagctgaagttgttgatgctctcgaatacatacataatttgggagtcatacatcgtgatattaagccagagaacttattacttacagctgaaggacatattaaaatagccgattttgggagtgtgaagcctatgcaggatagccaaataactgtccttccaaatgcagcatcagatgacaaagcctgcacttttgtgggaacagctgcttatgttcctccagaggttcttaattcctctccagcaacttttggaaatgacctttgggcacttggctgcacattataccaaatgctttctggaacttccccttttaaagacgcgagtgaatggcttatttctcaaagaattatagccaagagatcttagattttcagattacttttttggccaaacaagagacctcatttgacccgctgttggatttggacccc

SEQ ID NO: 8527 - DNA, 2357 bp, Glycine max
atgacaggtgttctgtttgccttgttcctgatttaagccataatagccacaaagagagagagaaagaaggcatgagaaaatgaatgaatgatctccatcatcattcccttccccatgtgatgtgccactcctctctctagggttttcaatcccccaatttcaatcgcagcccaacccaaagcttttccacctttcccattcattcgcacaattcccttcgcccttttccttttcggccaaaagggtctccggcgcttcgcctctctttgaccgttccgggctcgcctccccaggcctcttgagagagagagaaaactgcttttctagagagagaaagtcaccatgggaatgtagagtggagcttcttcccttgttgctgttgttgttgttgttggtgaccgagcaatgttggaaatggagaaggattttgattccaagctgaagattcaggggaattcctcatcttccaatggtgctgggaatgtacagagatccaaaagctttgcttttagggcaccccaggagaattacactatccaggactgtgaattgggcaagatctatggtgttggctctgcttcgtaggccccccccccaaagaagaaggacactggaattgtgtacgcattgaagatcatggacaaaaaatttattaccaaagagaacaaaacagcttatgtgaagttggaacgcattgtgctagatcaattggatcatccaggcattgtgcggttatatttcacatttcaagactcattttctctatacatggcacttgaatcctgtgaaggtggagaactttttgatcaaataaccaggaaaggtcgtctatcagagaatgaggcacgattctatgcagctgaagttatcgatgctcttgaatacatacataatttgggagtcatacatcgtgatattaagccagagaacttattacttaccgctgaaggacatattaaaatagccgattttgggagtgtgaagcctatgcaggatagccaaataactgtccttccaaatgcagcatcagatgacaaagcctgcacttttgtgggaacagctgcttatgttcctccagaggttcttaattcctctccagcaacttttggaaatgacctttgggcacttggctgcacattataccaaatgctttctggaacttccccttttaaagacgcaagtgaatggcttatttttcaaagaattatagcaagagaacttagatttccagattacttttctgacgaagcaagagacctcattgaccgcctgttggatttggaccccagcaggagaccaggtgctgcacctgatggttatgctattttaaaaaggcacccatttttcaagggggttgactgggataacttgagggcacaaattcctccaaaacttgctccagaacctgggactcagtcgcctgcggctgatgatgttcatgactcatcttggagtccttctcacattggggatggttctgcagcttcggttagacaacctgatggtgctacatcttctgaggggactggtcacataactaggctagcttcaattgattccttcgattcaaaatggcagcaatttttggaacctggggaatctgttcttatgatctctatggtgaagaaattacaaaaactaacaagcaagaaggtgcaactcatccttaccaacaaaccaaagctgatctatgtagacccatcaaagctaattgtgaagggaaatataatatggtctgataatccaaatgatttaagcatccaagtggctagtccatcaaatttcaagatttgcacacctaaaaaggtaatgtcgtttgaggacgcaaagcaaagagcatggcagtggaaaaaggctattgaaggacttcaaaaccggtgaatttattctggttttgtgaacatattcttttagatatcctctttattgttcagcaagagggataaaacagttgactgcccaacaatcaattattcattaaaagaaaacaaattcgcagattttgctgaagctggttctagctaattcctcaacacagcttaattttgtgatgagttcttccatcctctttcatgcttcgaagggacgataaaatgtggaagttctaattgtagctatgtctgaggatggacccaatactttgtaagaaaaaaaatggttttttaattatatattaaatattatgagttggaagatgatatcattctagttgtcataatgtatgaatcattgaattgctcaactttattgtttcttcagcccgtggttaaacagtgaaaccatcttgaaatttcaaatggataatttggcccttggctatctgtaaataacataggtgtaatctggcaattctatgt

SEQ ID NO: 8528 - DNA, 1376 bp, Glycine max
ttaagtaatcatatgactttaggctttaagtagcctttaatattgatcagtcatgtattggtatgctcctctcattctcatacaacatgacttatgtcaaaacaacctatgataaatgttcatacttcatatgcatcaataatgagaacaaattaagcaaggttaaggcttcagcctacataccatacaaaagcagattgatatcagatcattactgttagtatgtcactacccttccattgccaatgggttgatcatcccagacgatgataggcaacagaggaagcgtgcttcctacatacatcatttcagcagcagctttagcttcctccacagttagttttttagttgctacacctttcagaaagcccttgatcaaccaacttgggtgccagttcaaggagcctttttgcagtgcaaccatgtaagatgttatcaaaaggaggcatgacaagttccttgtcttgagttatgaaagcaacattcacatttggaccttcagcaatataaccttcctcatcaacccatatagaagaagatgctcctttctcttcagcttccattactgaaaggacatttggaagatagttcacatttttggctgtggcaaatagagaaggcttcattggtatgttggaagtaatcactttaactccctctttgcattgggaaatatcttggtcaatgactactgcatagaatgcagatgttggacatcctgctgatgatagcaagaaatctccaggacctgcactgagccagtatcttagagttcccttcttgcattttgatgctgcagttagttgtattagaatgctgtgaagcactgatcgagaaaagggagaggatatctttgctttggaggctgaacttaggaatctgtcaaggtgaacatccaactcatagaggtatccatctagaacaatagctgtatcaaacacaccatgccctctgtgaaccatgtgatcatcaatggggattaccatcattgctggatcaagtatgatacctccataaatactagaatacatagctgggtatggtggtttctccactgaactccatttttcatgaagcttttcaagcaactcggatgatgaagagaacagatgaactttaaaatcaccatcattttcaacctcaggggacttgtgagtggggttcctcatattgaaaggagaaagtgaaaaatagtaattaaggagtgtgtaggaaactagtaagtatatatatttggaactggagcagtggaaattactattaattaatagcaagaacaccagagaacaatttaaattattgtttgtctctttgtgtgtttgttttcttgttctttttgtttgagacgactgtgcgtgcccgggtttgcttcttcc

SEQ ID NO: 8529 - DNA, 1281 bp, Glycine max
  misc_feature (2)..(2): n is a, c, g, or t
tnatcagctacgtaggcccccccccataggcatagctggctgtgagcaattgtggtttcacagaacgtgatcttatcaactatggcggagaaacacaacatcaagaacccagccgtgaagcggattctccaggaggtcaaggagatgcaatcaaacccttccgatgactacatgagcctccctcttgaggaaaatatatttgaatggcaatttgcgatcagggggcctcgtgatactgaatttgaaggtggtatttatcacggacggattcagctgccttcagaatatcccttcaaacctccttcgtttatgttgctcacacctagtggccgttttgagacccaaaccaagatttgcttgagcatatcaaatcatcaccctgagcattggcaaccatcatggagcgtaaggactgctttagttgcattgattgcattcatgcccaccaacccaaatggcgcgttgggctcattaaactacaagaaagaagacaggtgtgccttggccactaaatcccaggaagcacctccaaaatttggaactcctgaacgtcaaagactgattgatgagatacacgagtatatgctaagcaagtcatcccctcttccacaacttgccccctcacaagcttctgaagaacaatccaaaactgaggaggccaaggcccaggttaatttggaaaatcccgaggctttacccgtgggagcggagattccagatcaagcaggcgacagaattgttgaagaacaagaactgcctgtcaatgctaatcctaaccctgcaggagttgaagcttcaatggagagttcatccagtgtctcaagtaaccagttgctccaaaagtcagatgcaagggttcaaaatctgaaaccagatacaagggttcaaaaacctgacgatcgattgttcacacttgctgctattggacttgctatagcaattgtggttcttttgctgaagaagttcattaaatctacagaatatggtgctgttttcatggatgaatcttagatgaatctttgttcatgttggcttcaatatcaagattcttagcccatggtatagtcgataggaaaatttagcacttctgtgatattttatgatctttgaattgtacgtatgtcttgtaattatggcaatactaatatcgatatactacagctttgagttagtgagcaagggtctacttttttgagaagggtctaaaaaaaaaaaaaaaaaaaaagaaaaaaaaaaaaaaaaagactcctgatttatgtatactaatcgaaagtactcctt

SEQ ID NO: 8530 - DNA, 900 bp, Glycine max
  misc_feature (790)..(790): n is a, c, g, or t
  misc_feature (799)..(799): n is a, c, g, or t
  misc_feature (807)..(807): n is a, c, g, or t
  misc_feature (829)..(829): n is a, c, g, or t
  misc_feature (837)..(837): n is a, c, g, or t
  misc_feature (840)..(840): n is a, c, g, or t
  misc_feature (848)..(848): n is a, c, g, or t
  misc_feature (855)..(855): n is a, c, g, or t
  misc_feature (858)..(860): n is a, c, g, or t
  misc_feature (865)..(865): n is a, c, g, or t
  misc_feature (876)..(876): n is a, c, g, or t
  misc_feature (888)..(888): n is a, c, g, or t
  misc_feature (891)..(893): n is a, c, g, or t
  misc_feature (895)..(896): n is a, c, g, or t
  misc_feature (898)..(898): n is a, c, g, or t
ggagagacacgtgagatagcacagtggcagggcgtgtcaatccgagagaaagaggcaaccaacttcccattttgttatttccattttccattcccaatcgtaaaaacaacaaatcataatcagtcatagcttcggcgacttctcgatattattttttctgacagagccaccgacagagccggcggttcccgtggcggtttgagaatggccgacaagtacaacctgaagaaccccgccgtgaagcggatcctccaggaggttaaggagatgcagtccaacccttccgacgatttcatgagcctccctctcgaggaaaatatatttgagtggcaatttgcgattagagggcctcgtgatacggaatttgagggtggtatttatcatggaaggatccagttgccttcagagtatccattcaaacccccttcattcatgttgttgacacctaatggtcgtttcgagactcaaaccaagatttgcttgagcatatcaaatcatcaccctgagcattggcaaccatcatggagcgtgaggactgctttagttgcactgattgcgttcatgcctaccaacccaaatggtgcattgggatctttagactacaagaaagaagagaggcatacactggccattaagtctcgtgaagctcctccaaaattcgggactcctgaacgtcaaaagctgatcgatgagatacacgagtacatgctaagcaaggcacctcctgttcctcaacctagcgccagtgaggcttctgaagagaacccccgcaaatgaagaggccgtaganccccggttnattttccnaaaagcccgagcccccttaccncggagganagnggctaatnaaggaantcnnncacgncgcccggtcanttgtttgtcacnacnnnanncncc

SEQ ID NO: 8531 - DNA, 1251 bp, Glycine max
tcagctacgtaggccccccccccactctgcagttacaaaatggcctgatatatttgactgtgtgctttataattatcaattactattgttgtctaggtagaatcatacattggcacaaaacatggcttcctctagatagaagtggcattgtattgattcccatatctttagatcataaggttggatgctataaagattgggtagaaaatactgatcaagcaaattaattgcattttaatgtataattagaatatgaatgcatctctgtttttttcatcattcttctttaacacactaccttcatttttgtagatcttatgcattatctttaactatacaggctgagccttgtagatgtctttgatggtaaaaagttctattttaattgatgtaaatatcttttggcagtgaggactgctttagttgcactgattgcgttcatgcctaccaacccaaatggtgcattgggatctttagactacaagaaagaagagaggcatacactggccattaagtctcgtgaagctcctccaaaattcgggactcctgaacgtcaaaagctgattgatgagatacacgagtacatgctaagcaaagcaccacctgttcctcaacctagtgccacagaggcttctgaagagaaccccagaaatgaagaggccgagacacaggtcaattcaccaaatcccgagtccttacctgcaggagagggtattacagatcaagaagttgatggaattgtggaagaacaagaagtcatccttgcaaaccctgcaggagttgaagtttcaagggaggttcaaccaagtgtttcaaggaatgaagtgctccaaaagtcagacacaagggctcagaatcctaagccagagacgagggttcagaaacatgatgatcggttgttcacgttggcagctattggactcactattgcaattgtggtccttttgctcaaaaaattcctcaaatctacacaacatggggcacttttctcggatggatcttaagacgttttgttgctgatgttggtttctgagattaaaaacttcttggcctttatgcagtaaatagaaatatagagctcttctaaactcaaatctcaaagaagcattttttttttttaatttgattgtacttttattacactatttgtaattatggtaatatatatgtgctcctgcaataaattgaggaggagcatggcctttgttattaaaaaaaaaattttttaaaaaaaactcgaactagttcttc

SEQ ID NO: 8532 - DNA, 1786 bp, Glycine max
ttcttttttttttttttttttttttttttttttttagcataaagcacagtaaatatgttggataataataattactataagttacatttttgtgtcaaagggctgagcaccactaactttaaagtccactccaccatctgctttttggcttggtagacctccctttgttgggtgcagataagataacatctacacttgataaccaaattctactcttccaatttaggtgaatcaaacattagtggataccggcaaagtatgccaaaggtccaacaaaagcaccattgatgtaagttgcaggctcagaatgactgtaatcactgcggtcatcgggaaatccgtcattttggtttggacctccgactatggctccaaccaatatgttaggattaggattcattgaatggaaaaacgggttgaaacctccatcacagcctatggtttgtggatgagcttctattgaaggcaaggaagatcctctgtggtgaactctcttgggaaagtaaggaccatagcctaccatgtaagacattcttaatgggtttgcacctaatatgtaatcaacctgtcttttagcaatgctccttaaggtgtttgtagttaccaagacattgccgcagttaaatgtgtgctttgtagctgacatatactttgaataggttgtaagcaagaatgttatagatgtcacatactggaggttactttcaggaagcttgtacatgagtcccccttgtgtatattgtgtgcttgaagagggagagttgggcaggatcttgcacataaaattctcagcttcttgcttgtattgatcaaaattcttatcaccattcagcaatgctctcctggagagaaggacgtgtgcaccagcatatttgttgtcccagctgaagatatctggctgatcatcagctcccaaggacttcaccaaattatagtagaaaacagcatttgttgctctgaaaagccatgcagctccccacaatagctcatccttgaaacctgaatatgagcaataaaatgggcaaacagctgatccaagtgaatcactataagaaccttgatactgcagagcaaagtggtagacctgttgggcagttcttaacaacttgttagagtatgttgggtcaacccttctgaaaacaatagatgcagcagcaagtgcagcagcggtttcagcagccacatcagagccagggttactgggagagacccaatagacagttctgacagtgtccatgtcctctggcctctcccagcatttgtggtccacatttgggtctccaacaccaacatagagcctaccaggtgtggatgtggcacacttgaggaggtagtctgtggcccaacgaattgcagctcttgcctctttgatttggggtcccattctcttcccatattcaattgtggcccatgacagcatggtagtggtgtaggccattggaaagttgaatttcacattgtctcctgcgtcatagtaccctccacttaaatccacattggctaggcgaccatcaaagaggccagaatttgatctccatttgatttgttggtcagaagaaagcctccctgacctctgcccttgaaaaaacaacaaggatttagccaatgcttctctgtagtttgggttgcattgaacattgcccacaaacaacaacaatgtgaggaggaacaatgtgaccaaggaatttcccatgctcactttttgctacttttgttgttggttgaagcaataaagtgctttgctatggaatttgtttatgacttgggggggggcctacgtagctga

SEQ ID NO: 8533 - DNA, 1235 bp, Glycine max
cagctacgtaggcccccccccccttttttttaaatctcttggccaaaaagttagttttaaaaagttattttagcaagttcatgtatcaatagggtaatatttataaattttaaataactaaatagtaagtttgcaaggcaataggttcactggtaacttagatatgtggattgacgttttgagaaaatatttgtttctaccatatgtatccttgaagatcgagattttgcatcaaggaagggtgatcccatgccattccctcctggggttggtggaggacgcatagttggagatgccaaccttgatacttttgaggtgattacggccgaaaaagcaattgacgaaaacaatgttggtaatcggatgcttcgcaacatgggctggcaggaaggattggtaccgttttgttcctcctcattacatgagtttttacgtattacatttttttgttattcaagttgtttggtagagcttgatatattattccaaatttcctcttttcagggatatgctagtactttgatcctagacctagataatattttcctctagtttagatatatgtgtatataatacacacacacacacgtatatatattattttcttcagtcattttggacctcaagaattggatgggatacccctggaaatttggtattttctcaacatatccgccgaaggattctaacatttcttcattatggttgtttcttgtattatggataatttgattacagggactaggaaaggatgggagtggaatgatagagcctgtcctggcacaagccacagaaaatagggcaggacttgggagtcaacagaagaagttggatcctagccttgaggtgcaggcaggggacagttacaagatgcttattcataaaaaagcacttgccaggtttcgggggatgtcagagagttaaggtttgagcacagtatataggagttagctttgataaatatattatttagatgttttatcaatattcttattgtaaacactagtttgccaggacaatttcgaatttcattttttgaaatttagtcaacatgtcaaattctgcccaaattaagcatgatctctgctttggttgaactctgacgagtgttttggaatgccattcaacttttttttgccttgagttgagttcaagtggttctgtcctgtgggtgtggtgtggtttacatattttgagatcaagaagccttttattggcagttttcaaaaaaaaaa

SEQ ID NO: 8534 - DNA, 2836 bp, Glycine max
  misc_feature (2803)..(2804): n is a, c, g, or t
  misc_feature (2807)..(2807): n is a, c, g, or t
  misc_feature (2831)..(2833): n is a, c, g, or t
cgacatagttatgattctgattatgaaagaggtagtagaagagatagtaattggaggcaacgcgaatcacgtgatcgggaaagagataagagaggtcatagtcgggaaagagatctgagtccacataggagacgtgagcgttctcgttcccattctcgttctcgatcccggtctcattcccattctcattcccgatctcaatctcgtggacatgatgaccatccaagatctaggtcccctcgaggtcgaagccatggtcgaagttataaggcagatagctattctgacagtcgatatgacaaaagcgaaagacgtagggatcgtgatgataaacgtcagcgagagcattattctgtggccccttccgcatctgttgttgtgaaaggtctttcacagaagacaactgaagaagatctataccaaatccttgctgaatggggtcccctccgtcatgttcgtgttataaaggagagaaattctggcgtctctcgtggatttgcattcattgattttccctctatgggagctgcccaaggaatgatggacaaactaggagatgatggtcttgttgtggatggcagaaaacttttctttgaatatagtagtaagccaacaggaggtcctggtccagatggagctatgaaatcaggtcataattataagagcatgatggttccatccgattggatgtgcactatatgtggctacataaattttgcacgccggacttcctgctatcagtgtaatgagccacgaactgatgatgcccctgcagcagatatttcattgtctaattcagcagctataggaaagaaaggttcagaggcaggtccaactcatgtgctggttgtccgtggattggatgaaaatgcggatgaggaaatgctccgctatgagttttccaaacatgctccgattaaggatctgcgtcttgtgagagacaagtttactcatgtctcaaggggatttgcatttgtacacttttattcggtggaggatgctaccaaagctcttgaggcaacgaatggaactatgcttgaaaagaatgggcagattctaagagtggcgtatgcaaaaagtatcctgggccctggatcaggaacatcaggaacttcccaatcaagcagtcttgcagctgctgctatcgaggctgcgacatttgcccaacagtatgattctgtgggatgggctccaaaagaatacaacccagatgccaaacaatctactggtccagagcaaactggtgcagaagttggtgctccacaatcaggctttgtttgggatgaagcatcgggttattactatgatgctgcttctgggttttactatgatggaaatactggtctttactatgatggtaataatgggatttggtattcatatgaccaccaaactcagcagtacataccttgcactgatcaaaatcagaataaagcatctaatgagtctgaaccttctaaggtatctgatggttctggaagtaaaaaggtcatttctgcaccagctactgctgttgcaccggttgagaagccagcttcattggcagatgctgtccaggctgcagcaactgctgctttagctgcagagaagaaagagaaagaaaaatcaaaggaaataaaacttgcctcaaaaagcagtatactggcaaacaagaaaaaaatgaacaatgtgttgaccatgtggaagcaaaggagccatgaggggcaggctactcgagtggctctggaagacaatcagccctccgcgtcccccggtgataggtcatattcttctgggcattctgcaaagaataagttaaaaaatgagactatggtaagggaaagtaatgcccctaatccaggaagtcacacaactcttgcccagagtgctgctattgattctcaggcacagccacagcctgttagtaatagccttggaggcactgtgatgggggttataaggggctcaggaagaggggttgttaaagcagatacttattcaggttctacatctgttgcatcatctatgccaagtttatctacagcaaatgttgatgcacagacagttgctactccctttagaacagatgtatctgccctgggttcatatacacaatctgtgattgttggaagtggtcgaagaaggttttcagaaatgcctcattctgcttcaactcacaaggaacaacctcaaacaacttaccgggaccgtgcagctgagaggaggagtttatatggctcatcatcttcagttggaaatgatttagctgaccttgaaattggcgattcaaatcgagattttgcatcaaggaagggtgatcccatgccattccctcctggggttggtggaggacgcatagttggagatgccaaccttgatacttttgaggtgattacggcagacaaagcaattgatgaaaacaatgttggtaatcggatgcttcgcaacatgggctggcaagaaggattgggactaggaaaggatgggagtggaatgatagagcctgtcctggcacaagccaccgaaaatagggcaggacttgggagtcaacagaagaagttggatcctagccttgaggtgcaagcaggggacagttacaagatgcttattcataaaaaagcacttgccaggtttcgggagatgtcagagagttaagatttcagcacagcatataggatttgatttagcttcgataattattatttagatgttatataaatattcttattgtaaacactagtttgccagaacaattttgaaatttagtcaacatgtcaaattctgcccgtcaaattctgcccaaattaagcacgatctctgcttnngtngaactctgacgagtgtttggaagnnnatg

SEQ ID NO: 8535 - DNA, 1933 bp, Glycine max
  misc_feature (18)..(18): n is a, c, g, or t
  misc_feature (1659)..(1659): n is a, c, g, or t
gcctgcaggtaccggtcncggattccggtcgaccacgcgtccgtggacctggaccggggtcgactggctttggcggtgctggtgggatgggaggaggtggtggaggtgttggtggtggccctggtggcgggcttggtggtgctggtggtggtagttctatgtatagattgccgggttcgggcggaatgcctgctggtggtactggagggtatccggatagtggacactatggtttatcagcttcctctgggtaccagaatcagcatcaccctccttctggaacttcacctatgcctagggttccgcctggttcgatgtatcccaatatgcccccttactactgaagaggtgtatcatcgcttattgggcgcagatgctttgtgtgcctctggtgattgcgtgaattgcagactatgtgctctggtgtaatgaatttgttagactgtacttttacagcctcttgacttcatctgccccctttttaagcattgattcatatggatgttgctagttaaagccgttgagatagactagttttgtacttttagctggttcttctgggctgatacagcctcctgttttaaattatatagtcctggattttggtgaattttattagctgttgtatttagtcacattttcctatgcttagtgttcacaaaaatttgttcaaagttgtggttgttttatttagtgtgtcaatattttctaattgattgttatatgctgttgatttagatgccatggttatctaataattttctaatgtagtggtaaaccgaagattttttttccactgttagaacttagaaagtaatttgtcataatgaccattttactacctaatgctatgcataaatccttgtctttgcaaaaggtttttgacaacgggaattggtgatattcttttaagcttgggtatttcattttgttaaaatatacatactcagcacctattgagtacagatacattttgggtacacttatcaagattaatcttttaaaaaacattatgtgcaagattgattatactaatttcttttattatagattataggtgttttaactgtaatatataaagtcttgtcccattagaataaggtcaattacaaggattacacgatgtcattggagttggttaaaagccaattttatatttatcttaaggttccttttgataatttcttctatatccttcttggtctccttttacctctttttacatagctaaaagttgtagctggttccctgagtggcctcttggtctggcaaaacttcattgtttttctcccatcttttccttgataggtaccaaaccaatatcttctcgcatataatcattccatatctagtcctttcttttgtgggaatagcagatatgagtatgataagatagcaaatatgagttattttgtttaattgtatcaggcttgtgctgtatgaatttattgtctacgctgagtggcaagttgtttcactagatggctattcactagcatggattgttaatattcttgagctgtacttaattttaatttaatttgtagttctcttgctccttgaatattgttgaattattgtctttttcagtctcgccttgagtatgagtcaaaccaccttgtacgagtttaccctttttgtacaagtcccggcatgggngcctgttttgtgaaagatagctgtgaaattgtaaacttcaatgaattgatgctgttatttcaatctgatagggttttagtttgttttgctggttgatgacgaaggcctttgcatcatcttcagtgttttggcttgagattgttgattgctaatatggagactggacgagaaacatactttgtctaacactctttacttgagctcgacattatgtttatgatgataaagaagattgatggacatctttgcttccttctgcttcttgtacccaaat

SEQ ID NO: 8536 - DNA, 1269 bp, Glycine max
ttttttttttttttggggcaagccagcttaagccacacgctagggccgctgtaacagatttgagaaaatgaacatttacaaaactacaagtgtaaaatacaatcagcatttcacaatgaattccatccatccaaggtcgagcaaattatcaaaattaccacgggcaacacagcagccaacaaaaacagaatcatcagtgagatacattaactacactacagattagcaatggaaaaaaatgagattatgcagcgagactcaaacttattaactgaaaaacaacactatgaacaagcaaaaaagttccattgtgagtcactaatttgacgaattcagttcctcagaaaatccccgtgtctctctgacataagttgataaaacacacctaattccactttcaaattcaattttggccaatgcatcaccacaaacacaattacaacaccgcctcattaagtgactagccttcaaaacaagtgacccagcttcgaaagttaaactctcccttctcaaattaggggtaaaaactcaaaaactcgatgatggttgcggaaccgaacataatataatcaaatgggggtataatttgttctgagaggctgagttcccacaacggaaagcaacgaactttcctcgtcaagaaacaaatcctcggtaccctaaatgcggcgtgcaagccaacaagaaccacggcgacgatcagcgagagcaagacgttgaggccgacgtgagtggagacgagcgcaacgacagtgagcaaacccaaaacgcagagcacggttctgtcgtcgagggtttggttgaaaacgacgaggaggccgtcgcgagagaagtagaggtagtaccaggcgacgaggacgaggaggaagacgatcatggagacggggtgccagaggaggctgaggaagacgatgaggagcgtgacggcggcgtagttgaagcggaagtggctcaggtttcttcggacccggatcatggcgtcgtcgtaggagtaggggcaggagagggctgagaggtccagaaactcgcgccatggacggggagtcaccaaggaggtagtggtggtggtggtggtctggtggtggttccagtaggagtggcgccggcgagggtgccgtagccggcggtgggaatgtgggacatttgggagtgttggttagatctgaaatttgtacatggatgggatgcgatttgatttgattgagattttgagattcagaggccaaggaatgggggtgccctgatggccgggtttctctctctctttag

SEQ ID NO: 8537 - DNA, 1429 bp, Glycine max
tacggctgcgagaagacgacagaagggggaagaccaaagatgaactggggaattgactagtgcggcgcgctcctattatcaccgtagacggcggaggtggcggtggtggtgtagacacggcgtgacggcgatctcttgagataaatgttggttgaaagaggaagaagaagaagagttgtattgtagaatgagccaaccaacggtgatacttgccactgcgagctatgatcacactattcgtttttgggaggccaagagtggccgttgctaccgcaccatccaatatcctgattcgcaagtaaaccggctggagataaccccggataaacgcttcctggctgcagctggcaatccacacatacgactgtttgatgttaactcaaatagtcctcaaccagtaatgagctatgattcacataccaataatgtaatggctgttgggtttcaatgtgatggtaattggatgtattctggctcagaggatggcacagttaaaatctgggatttgagggcacccggttgtcaaagggaatatgaaagtcgtgcagctgtaaacactgttgttctacacccaaatcagactgaactaatatctggtgaccaaaatggcaacattcgtgtgtgggatttgacagcaaattcatgcagttgcgaattggttccagaggtggatacagctgtacgctctttaacagtaatgtgggatgggagcttggtagttgcagcaaataatcacgggacatgttatgtgtggcgcttgttgcgagggactcagacaatgacaaactttgagcctcttcacaagctgcaagcacacaagggatacatcctcaaatgtcttttatcacccgagttctgtgaaccccacaggtacttggcaactgcatcttctgatcatactgtcaaaatatggaatgttgatggttttaccctagaaaaaactcttataggtcaccaacgctgggtgtgggactgtgtcttctccgtggatggcgcctaccttattacagcttcctctgatacaactgcgaggctctggtctatgtcaactggtgaagatattaaagtttaccaagggcatcataaagctacaatttgctgtgccctacacgatggggctgaacccgcaacttcctgagataatggtcataaagttatttttctccatcagctacatcttgttttgtaaataataatctgcctcttgatctttgaagtttactatagttctttgactttatgcacgtttagtcaataagaatcctcttcgtggatgatatacgctgtccggagtaatctaaatttgtaacatgagaatatttctaatattatttgtcagtaatttctcaattagagtgctcttgtcaaatagcgtggatcaaaacacaaataaatatttcatgatatcaccatgcatcaaaaaaaaaaa

SEQ ID NO: 8538 - DNA, 1234 bp, Glycine max
ccacgagattcagaaggccatagaagttgttgatctggaccagaagataaagatggttcaagaacttgatggaaatatcatgcgttgtgtgcgagatcagaatggcaatcatgtaattcagaaatgtattgaatgtgtccctgaagatgcaatcaactttattgtctcaactttttttgatcaagttgtgacactatcaacccatccatatggttgccgggtgatacagagagtactggagcattgcaaagaccctaacacccagcaaaaagttatggatgagattttaggagcagttagcatgttagcccaggatcagtatggcaattatgttgtccagcatgtacttgagcatgggaaacctcatgagcgatccgccattatcaaggaattagcaggaaagatagttcaaatgagtcagcagaagtttgcctcaaatgttgtggagaagtgtttgacctttggaggtccttctgaacgccaattacttgtgaatgagatgcttggttccacagatgaaaatgagcctcttcaggcaatgatgaaagatcaattcgccaactatgttgtacaaaaggtgctggagacttgtgatgaccaacagcgagagctaattctttcacgaattaaagttcatttgaatgcattgaaaaagtacacctatgggaagcatattgttgctcgtgtagagaaacttgttgctgctggagagaggagaattgctgctcagtctcctcatcctgcttaggtgggcatagaaagttgtttgtacagctaactgaggctagtgtgagcttcctcctctcttttcctgcatccggaggttatgtttattcctatctcaatctgtcgtgatgggtagtggccgattggaaataaaaacactatcggttttaatgaagaactgtacattttgtagtccaaagtttatacatagaagaagaatttaagtgaggcgaggctcagatgtgtaatactcacctgatgcccccctgcagcagaggagataaagcgacaatacgagcctttttaaggatgtaaagttttataaaacgaacggtgaggtagtttataagttgacgcgactgtacaaaatgttggcatgtggagagctgtttatgtttaggtgagagcagggtttttctttcatgtatgtttattgactttattatgccccaattttacaagtttactttccccttcattttatcttgtgatagcgatcatgtcttaa

SEQ ID NO: 8539 - DNA, 2761 bp, Glycine max
ctgcagtaggatcttccctgtcaagaagcgctacgcttgatccccactttgttgtagggctcccagtccctgcatcacacctattggtggcggcagagccattgcttctgacaagagagctattgcgagtacagatgcttttaatggtgtttcatctggcatcaatgagtcagcagatcttgtggctgcattgtcagtgatgaacttgtcaacagatgatgtgctagatggtgaaaaccatttgccatcacagattgaatcaggtgttgataatcaccagagatatctttttggtaagcaagatcatgggaagcaacatgctttttcaaagaaatctgaatcagcacacttacaaaattcaagtaagaagagcaggagtgggtcagatctcaacaatccatccttggataggcaggttgagttacaaaaatctactgttccttcgaataactcatatttcaaaggatcgcctacctcccattttagtagaggaggaagtatgccaccccagtaccagcctttagatagtacaaattcatcatttggtaactatggtctgagtggctatgctggaaatccagcattggcatccttgatgactaaccaacttggcactggtaatctgccacccttgtttgaaaatgttgctgcagcatcagcaatggcagcccctggaatggactcgagaattcttggaggtggtttggcttctggagctgctgctccatctgatgtgcataatcttggtaggatgggaaatcaaattccaggcagtgctcttcaggctccttttgttgatccaatgtatcttcagtacctgaggacatctgagtttgctgcagcacaacttgctgctctcaatgacccctctgtggacaggaactacttaggcaattcatacatgaatttacttgagcttcagaaagcttatcttgggtctatcctctcgcctcagaaatcccaatacaatgtaccgctgggtggtaaatcaggcagctccactcctcatggttattatggaaatcctgcatatggtgttggaatgtcttacccaggaactccaattgcaaactctgttgtgtccacttcgccagttggatctggaagtcctgttaggcacaatgagctgaatatgcgttttgcttctggattgaggaatttagctggggtcatgggaccttggcatgcagatactgggaacattgatgaaagttttgcttcttctctgttggaagagtttaaaaccaataaaacaaagtgttttgagctctctgaaattgcgggtcatgttgttgaattcagtgcggatcaatatgggagtcgatttattcaacaaaagcttgaaacagctactacagaagaaaaaaacatggtttatcaggaaatcatgccacattcccttgctttgatgactgatgtctttggtaattatgtggttcaaaagttttttgagcatggacttgcatcccagagaagagaattagccaacaaacttcttggtcatgttctgacacttagccttcaaatgtatggttgccgtgtcatccagaaggccattgaagttgttgatctggatcagaagatagagatggttcaagagcttgatggtaatgtcatgcgctgtgtacgcgatcagaatggtaatcatgtcattcagaagtgtattgaatgtgtccctgaagatgctatccactttattgtctcaacattttttgatcaagttgtgaccctatcaacacatccatatggttgccgggtgatacagagagtgctggaacattgcaaagaccctacaacacagcagaaagttatggatgaaattttaggagcagttagcatgttagctcaggatcagtatggcaactacgttgttcagcatgtgctggaacatgggaagcctcatgagcgttcttctataataaaggaattagcaggcaagatagttcaaatgagtcaacagaagtttgcctccaatgttgtagagaaatgtttgacctttggaggtccttctgagcgccaattactagtgagtgagatgcttggcaccaccgatgaaaatgagcctcttcaggcgatgatgaaagatcaatttgcaaattacgttgtacaaaaggtgctggaaacttgtgatgatcaacaacgtgagctgattctttcccgaattaaggttcatttgaatgcattgaaaaagtacacctatggaaagcacatcgtcacgcgtgtagaaaaacttgttgctgctggagaaaggagaatagctgctcaggctcctcctcaacctgcttaggtggcttagaaaaataatcttgtacagctaactgaggctagtgtaagctgctgctgcttcctccgcccctcccaaatccaagaggtcatgtttgcctatctctcaagatgggttgtgtagccaattggaaataaagttgtcggttttactgcagaaactgtacattttgtagcttttaagtttatacaaagaatttaagcgagagatgaggcctcagatgttttaatgcgcctgatgccccctgctgcagaggagagagagataaaattaaatgaaatattatgactatacaagcccatttacggtgtaaagattgtaaaatggtgagttagtttataagttgacgcgactgtacaaaatgatgatgctcttgtttaggcgagggcagtttttttcttcattttcatttaatcatgtatggttgttgactttgtttcccctttcaagagtgtattttttgttgctagtttactt

SEQ ID NO: 8540 - DNA, 2738 bp, Glycine max
  misc_feature (286)..(290): n is a, c, g, or t
ctgcagaggatcttccttgtcaagagcactactcctgatcccaacttattgctagggctcccagtccctgcatcactcccattggtggcggcagagccattgcttctgacaagagagctattgccaatccagatgcatttaatggtgtttcatctggcatcaatgagtcagcagatcttgtggctgcattatcagtgatgaacttgtcagcagatgatgtgttagatggtgaaaaccatttcccatcacaagttgaatcagatgtagatagtcatcagagatatcnnnnnggtaggcaaggtggtcaggatcatgggaagcaacaggcttatttaaagaaatctgaatcagcacacttgcaaaattcaagtaagagcagcaggagtggatcaggtctcaacaatccatccttggataggcaggttgagctacaaaagtctactgttccttccaataactcatacttcaaaggatcgcctacctcccattttagtggaggaggaagtatgccacctcagtaccagcctttagatggtacaaattcatcatttactaactatggtatgagtggctatgctggaaatccagcactggcatccttgatgactaaccaacttggcactggtaatctgccacccttgtttcaaaatgttgctgcggcatcagcaatggctgcccctggaatggactcgagaattcttggaggtggtttggcttctggagctgctgctccatctgatgtgcataatcttggtaggatgggaaatcaaattcaaggcagtgctcttcaggctccttttgtcgatcccatgtatcttcagtacctgaggacgtctgagtttgctgcagcacaacttgctgctctcaatgacccctctgtggacaggaactacttgggcaattcatacatgaatttgcttgagctccagaaagcttatcttgggtctgtcctctcacctcagaaatcccaatacaatgtaccgccgggtggtaaatcaggcagcttcactcctcatggttattatggaaatcctgcatatggtgctgggttgtcttacccaggaagtcctatggcaaactctgttgtgtccacttctccagttggatctggaagtcctgttaggcacaatgaactgaatatgcattttgcttctggaatgaggaatttagctggggtcatgggaccttggcatgcagatactgggaacattgatgaaagttttgcttcttctctgttggaagagtttaaaaccaataaaacaaagtgttttgagctctctgaaattgcgggtcatgttgttgaattcagtgcggatcaatatgggagtcgatttattcaacaaaagcttgaaacagctactacagaagaaaaaaacatggtttatcaggaaatcatgccacatgcccttgctttgatgactgatgtctttggtaattatgtggttcaaaaggtttctgagcatggacttgcatcccagacaagagaattagccaacaaacttcttggtcatgttctgacacttagccttcaaatgtatggttgccgtgtcatccagaaggccattgaagttgttgatctggatcagaagatagagatggttcaagagcttgatggtaatgtcatgcgctgtgtacgcgatcagaatggtaatcatgtcattcagaagtgtattgaatgtgtccctgaagatgctatccactttattgtctcaacattttttgatcaagttgtgaccctatcaacacatccgtatggttgccgggtgatacagagagtgctggaacattgcaaagaccctacaacacagcagaaagttatggatgaaattttaggtgcagttagcatgttagctcaggatcagtatggcaactacgttgttcagcatgtgctggaacatgggaagcctcatgagcgttcttgtataataaaggaattagcaggcaagatagttcaaatgagtcaacagaagtttgcctccaatgttgtagagaaatgtttgacctttggaggtccttctgagcgccaattactagtgagtgagatgcttgggaccaccgatgaaaatgagcctcttcaggcgatgatgaaagatcaatttgcaaattacgttgtacaaaaggtgctggaaacttgtgatgatcaacaacgtgagctgattctttcccgaattaaggttcatttgaatgcattgaaaaagtacacctatggaaagcacatcgtcacgcgtgtagaaaaacttgttgctgctggagaaaggagaatagctgctcaggctcctcctcaacctgcttaggtggcttagaaaaataatcttgtacagctaactgaggctagtgtgagcttctttctttgtctcccagatcaagaggttatgtttgcctatctctcaagatgggttgtagccaattggaaataaagttgtcggttgtattgcagaactgtacattttgtagcttttaagtttatacaaagagtttaagctaagcgagatgaggctctcatcagttgttttaatgcacctgatgccccctgctgcagaggagataaagtactatacaagcctttttatggtgtaaagattataaaatggtgaggtagtctataagttgacgacatgactgtacaaaatgatgatgttcttgtttagacgaggccagttttttcttcttttcttttaatcatctatggttattgactttgtttcccctttcaagagtataatttttcttgctagttt

SEQ ID NO: 8541 - DNA, 1717 bp, Glycine max
tcgagttcagctacgtaggcccccccccccatacttcatagcaaaaacgctttctcaaaacaagcagtgtcacgcagctgaatcatattcactccaaaaaaaaaaaaaaagctcagagagagagaatggggaaaagacaaatcccagaccctccgaactttaagaaatacggcgttcctttctactccgttgcgtggattccccaacacgttgtcaaatcgcgccaaatcgaaaccgccgatgagtcctcggactccgatcacagcacttcgccggcgaccgaggcggagaaggaacccgcgacggtcgccggtaactacctgctgttcgccggcggcggcggagcaggccacagcggtatccccaatgctttggttattgcgcacttcgatgtcgcgtcgaattctctctctgatcaaccggtgtgtaagctaggaactgattctgaattgccttataggatggcacttaactctaatggtgatggccttatttgtgcaatggaaacgcccatggtttgcagatggtttgactgggatcaaaacaagagctctgaaattcataagttgagtctgaagttgtcagagaaagtgctctcacagttggaggatgttggacagcaattagcattggcattcaacaatgatggtactgcactagctgctggtggggaggatggcaatctaagggttttcaagtggcctagcatggaaattattctcaacgagactaatgctcattcttctttgaaggacttacatttcagttctgatggtaaattacttgcctctttgggaagtggtggcccttgcaaggtttgggacgtttcttcatcaatggtcttatcttctctatcaaatgaaaatcgcgaaacttttagctcttgcagattttctcaaacaaatgacgagactctgatcctatatattgctgccatgactgataaaggtggaagcatcctgacctggaatacacaaacatgggaaaggatggcctcaaagcatattattcgtgatccaatctctgcatttaatgtctcagctgatggaaagtttcttgcgtgtggaacaccttcaggagacattgtagttgtaaattcaacaaatatgcagattcacacaatgataaaaaaggctcaccttggcatagtaactgctttagcattctcccctgattcaagggcggtggcttctgtatccatggattcaagtgcgagggtaacaataattgaagagaagaagactaatgggcttagcttgtggattgcattatttatcatcctacttgcagtagccgcttacttcctgaggcaagaaattgaaaagtgaaggttccaagattttgcttattgaaatatgaaacaattagcatccttgtgaatgctactgcttatttttgatgcattgtcattttttaaggggtttgctgatacttttatatattttggcatctttatgaacagttgttctaggacacgaccctctctctaaaatgccttgtaacatgggttgtatcgttacgttacatgtttcgtacaatgcttccaggtagaattgagctatcattcattacttgctatttgctgtgtattttgatgttatatgatatatagctttcactgtcagaagtaacccgagggcacgggttttggattaccaaaaaaaaaaaaaaaaaaaaaaaaaaaaaaaaaaaaaaaaaaaaaaaaaaaaaaaaaaaa

SEQ ID NO: 8542 - DNA, 1494 bp, Glycine max
tcagctacgtaggcccccccccctttttttcttctgtaattttatttattgcttaacctgttttgcatttgggccctctatttctctctttatctcagcttctaaggcaggtggaatgtgagcagcttggcaggacctaatattatgctgaggaatttgttgtgggcaacttcgaagcatgatgtatactttatgcaaaactattcagtgatgcactggtccgcattactacgaaggggtaaagaagtgcttaacgtagccaaaccaattattccaacccttaagcgtcctggatttttagctcaacctgtctccagagtgcaaataagcaccatgactgttaaggaaaatctgatggtggcaggtggtttccagggtgagcttatatgtaagaatttgaaacatcctggagttctattctgtggtaaaataactacagatgataatgccataaccaatgctgtggatgtttacagcaatcctgctgggtcattgagggtcatcacagcaaataatgatttccaagttcgggtttttgatgcagagaattttgcttctcttggttgtttcaagtatgattggtctgttaataacacttctgttagtccggatggaaagttgttagctgttcttggggacagtactgagtgcttgatagctgatgctaacaccggaaagattactgggagcctaaaagggcacttggactactctttttcatcagcttggcacccagatggacaaatattggccactgggaatcaggacaaaacatgcagattgtgggacataagaaatctttcacagtctatggctgtgttaaagggaagaatgggtgcaataagagccctaagattcacatctgatggacgatttttggccatggctgagcctgcagactttgtccatatttttgactcacattctggttatgaacaaggtcaagagatagatctatttggcgagattgctggcatatcctttagcccggacacagaggctctatttgtgggtattgctgaccgaacctatggtagcttgttagagttcaacagaaaacgtcactataattacctagactcgttttgatggagtggagtgcctcaagatgtacagcaactactccatgtgcatatccaccagaggattcctcaaataggtttgaaatatatatggtgaaatgtttttctagggttatttttctgttgaatttagtggagaagcaagttgtaaattttggctataggaagctatttttgagatttctttaattttgattttattagcgttggaatagctgattagtttttcctttgtaagaatttatttgcttgctattgaatattaaaaggtaatgaaatcaagcaatatattgctttaaaattatttttccaatatggtccttcctgttcttcgaatgtctcgagttataatgttaccagttaagattttgatgtatattagaataatcataagagatggactattggaacc

SEQ ID NO: 8543 - DNA, 982 bp, Glycine max
gtttatttacctgaagaaatacactcgaacgagtataaaacggcggcgagaagacgacagaacggcattgtggttgatgttccttcattcatcttcatttctcttgcaagtaactcttcagattttggttttttgttccctatccgctctctcttattcacttcttgaacatggcggtggcaccttacaccaccggttccgcacctcgtttttctcctcctcctacttctagtgttgccacaaagctctattccggattgaaacttcaagctgcgagttctttccgagcggcaagacctaacgtaaccgctgaattttatggaaaagttcacaacactcttcactgtcggtatgctaaccacaatccatcaatggcacgtattcgaatgatgcccatagggactcctaaagtcccctataggacacctggtgaaggaacttggcaatgggttgatgtatggaatgccctttatcgagaacgtgttatcttcattggacaagagatagatgaagaatttagtaaccaaatattggcgacaatgctgtatcttgacagtatagataactccaagaagctttatatgtacatcaatggtcctggtggtgatcttacaccaagcatggctatatatgacaccatgcagagcttgcaaagtcctgtagccacccactgtgttggctatgcttatagtcttgcagcatttctccttgcagctggagaaaagagtaatcgttctgcaatgcctctatcaagagttgcccttacatctccagctggagctgctcgtggacaggccgatgacattcagaatgaagcaaatgaacttcttagaatcagagattaccttttcaatgagttgtctaagaaaacagattaccaaagacctgagcaggatgaaacgcttcaacgcacaggaagctcttgaatatggtctcattgaccgaattgtcaggccaccccgcattaaggctgatgcacctc

SEQ ID NO: 8544 - DNA, 1152 bp, Glycine max
  misc_feature (1)..(1): n is a, c, g, or t
ngtcgcatgcacgcgtacgtaagctcggaattcggctcgaggaaaagttcacaacactcttcactgtcggtatgctaaccacaatccatcaatggcacgtattcgaatgatgcccatagggactcctaaagtcccctataggacacctggtgaaggaacttggcaatgggttgatgtatggaatgccctttatcgagaacgtgttatcttcattggacaagagatagatgaagaatttactgaccaaatattggcgacaatgctgtatcttgacagtatagataactccaagaagctttatatgtacatcaatggtcctggtggtgatcttacaccaagcatggctatatatgcccccatgcagagcttgcaaagtcctgtagccacccactgtgttggctatgcttatagtcttgcagcatttctccttgcagctggagaaaagagtaatcgttctgcaatgcctctatcaagagttgcccttacatctccagctggagctgctcgtggacaggccgatgacattcagaatgaagcaaatgaacttcttagaatcagagattaccttttcaatgagttgtctaagaaaacaggtcagcctcttgagaagattaccaaagacctgagcaggatgaaacgcttcaacgcacaggaagctcttgaatatggtctcattgaccgaattgtcaggccaccccgcattaaggctgatgcacctcgcaaggaggcaggcacaggtcttggttaaaaacatttggaacacgcattacatagtaactaatatggctgaatcaaaatgtttctcatgtaatatttgcttcttcaatttttggagtttgtataataatatttggatagttagaacctgttggctagatattgattgtttgtttagaagtgaatgaatttcaattcttatgcagagcagtaaagtaagtaaagtaaggttaataaagacgaaatagttgctcaacaccctctttccagtcctagtcccatcccatcttacgtgatcatctaccgagcaccggagaggcagaatttccatattaaaaggatcatttatttagttgtattgaagaatcattttattaagaagttcttacatgtttgaactttgaagagcaaataataaaatgttttgtaccattg

SEQ ID NO: 8545 - DNA, 1148 bp, Glycine max
tcagctacgtcggccccgcccccaatgttcatttctcttgcaacaagtaactcgttcagattttggtttttgcttccctatccgctctctcttcttcacttcagtatggcggtggtaccttacaccaccggttctgcacctcttctttctcctccttctacttctagtgttgccacaaagctctactccggattgaaacttcaagctgcgagtcctttcggagctgcaaaacctaacgtaaccgctgagttttatggaaaagttcacaacactcttcactgtcggtatgctaaccacaatacatcaatggcacgtattcgaatgatgccaatagggactcctaaagtcccctataggacacctggtgaaggaacttggcaatgggttgatgtatggaacgccctttatcgagaacgtgttatcttcattggacaagagatagatgaagaatttagtaaccaaatattggctactatgctttatcttgacagtatagaaaactccaagaagctttatatgtacatcaatggccctggtggtgatcttacaccaagcatggctatctatgacaccatgcagagcttgcaaagtcctgtagccacccactgtgttggctatgcttatagtcttgcagcatttctccttgcagctggagaaaagggtaatcgttctgcaatgcctctatcaagagttgcccttacatcaccagctggagccgcccgtggacaggctgatgacattcagaatgaagcaaatgaacttcttagaatcagagattaccttttcaatgagttggcacagaaaacgggtcaacctgttgagaagattactaaagacttgagtaggatgaaacgcttcaacgcacaggaagcccttgaatatggactcattgatcgaattgtcaggccaccccgcattaaggctgatgcaccacgcaaggaagcaggcacaggtcttggttaagaatatttggaatccgcattatgtgtttgaagagcagagaataacatgttttgtatcattgaataatgcatgaatattatattagtcatgacattaaaaatgagaaatgttacaacacatttttattttctgatacacttaaaaaaaaaaaaaaaatcacgaatttatctgagatttaaaaaaaa

SEQ ID NO: 8546 - DNA, 887 bp, Glycine max
aattatagagagcgaatataatactattgttcttcataactctgtaggcggcgatctcctttgtctccgttccatcgtcaaccctacctttcgatctgcgtttggcgttcaggtttgaagtccgaaggacgaagaagagatttctgacagcgtaatcatgtttggtgtcgtaaggcgaagggttgcttctggcagcccgtctccttggttgcttggtcagtcagttcagaacattcggtctggcccatcagtttctgctagagcttcttccattgcgggaaaagagattgcatttccttcaggcggatgtggatttgtccgaaacttcagtcatataacccttggaagctggattaattcaaagcctatgagggtggtcattcatccagaggcaaccgttcaaactttggggcgtctattttcttcagaaagtggagatacggttgatgttgtggttcctcctttggctgaatctatctctgatggaactctggcacaatttttgaagagacctggtgacagggttaatgctgatgagccaattgctcaaattgaaacagacaaggtgacaattgatgtttcaagtcctgagtcaggcgtgattctaaagcttctagccaacgaaggtgatactgttgagccaggtaacaagatagcaatcatttcaaggtctgctgatgcaactcacgttgccccatctgagactacatctgagaaaggtgctcctcagccaacccaaaaggttagcgaggagaagaaagctcccaaagttgaaactgctcctgctaaagagaagccccaagcacctcctgccatttctgaagtctcccaaccgagccccagctttcctcttaaagaaagaaaaagaccaggttccttttgccagg

SEQ ID NO: 8547 - DNA, 1982 bp, Glycine max
atatttgacttggaaaatagtgttttgaagacagtaacgaaaagatagggaaattagacataagaaatgcgattatagagagcgaatagaatattgttcttcagaactctgtaggcggatctcctttagtcctttgtctccgttccgtcgtcaaccctacctttggatctgcgtttggccttcaggttttgaagtccgaaggacgaagaagaagagattcctgacagcgtaatcatgtttggtgtcgtaaggcgaagggttgcttctggcagcccgtctccttggttgctaggtcagtcagctcagaaaatccggtctggcccatcagtttctgctagagcttcttccattgtggaaaaagagattgtatttcgttcaggcggatgtggatttgtccagaacttcagtcatataactcctggaagctggattaattcaaagcctatgagggtggtcattcatccagaggcaactgttcgaacttgggggcgtctattttcttcagaaagtggagacacggttgatgttgtggttcctcctttggctgaatctatctctgatggaactctggcacaatttttgaagaggcctggtgacagggttaatgctgacgagcctattgctcaaattgaaacagataaggtgacaattgatgtttcaagtcctgagtcaggcgtgattctaaagcttctagccaacgaaggtgatactgttgagccaggtaacaagatagcaatcatttcaaggtctgctgatgcaactcacgttgccccatctgagactatatctgagaaagctgctcctcagccaacccaaaaggttagcgaggagaagaaagccccgaaagttgaaactgctcctgctaaagagaagcccaaaacacctcctgccactctgaagtctcccactgagccccagcttcctcctaaagaaagagaaagacgagttcctatgacaaggcttcggaaacgagttgctacacggctgaaagattcccaaaacacatttgctatgctgactaccttcaatgaagttgatatgactaatttgatgaagctccgttctgattataaggatgcttttgttgaaaagcatggagtcaaattggggcttatgtctggctttgtcaaagctgctgtcaatgcactccaacatcagccgattgtcaatgcagtcattgatggtgatgatattatatacagagattatatagatatcagcatagctgttggtactccaaagggccttgttgtaccggttatccgcaatgctgataccatgaactttgctgatatagaaaagcagattaatacttttgcaaagaaggcaaatgatggatctttatcaattgatgagatggctggaggcactcttacaatatccaatggtggtgtttatggaagccttttgagtacccctattatcaaccctcctcagtctgcaatcttgggtatgcattccatagtgagccgtccaacggttgttggaggaaatattgtcccaagaccaatgatgtacgtggctctaacatatgaccacagaattattgatggaagagaggccgtgttctttctgcgacgcatcaaagatattgtggaggatcctcgcaggcttctgcttgacatatgaagtgaacctctaattttaaatggagtaaattaaacctcaaaattcaaataccataatgggtaccctttggtttggattttgaattgcggctgtccgtaatttataatctgtaatgagcaaactctttaggatcatatcccaatttccgttcgatattaattcagcatgtttgtgttttttctacccgctattcctctcatttaatatgaagagggtcacagtttttggctacaaaattgttgtatgaaacgactatgaactatactgtagggattgcccccgaagtaataatgcgatctcttttcatagcaaaaaaaaaaaaaaaaatatcgaaaccgtccaacctcgagggg

SEQ ID NO: 8548 - DNA, 1127 bp, Glycine max
ccacgcgtccgctcctgctaaagagaagctcaaagcacctcctgccattctgaagtctcccaccgagccccagcttccgcctcgtgggccccccccacgagttcctatgacaaggcttcggaaacgagttgctacacggctgaaagattcccaaaacacgtttgctatgctgacaaccttcaatgaagttgatatgactaatttgatgaagctccgttctgattataaggatgcttttgttgaaaagcatggagtcaaattggggcttatgtctggctttgtgaaagctgctgttaatgcactccaacatcagccgattgtcaatgcagtcattgatggtgatgatattatatacagagattatatagatatcagcatagctgttggtacttcgaagggccttgttgtaccggttatccgcaatgctgataccatgaactttgctgatatagaaaagcagattaatgcttttgcaaagaaggcaaatgatggaactttatcaattgatgagatggctggaggcactcttacaatatcaaatggtggtgtttatggaagccttttgagtacccctattatcaaccctcctcagtctgcaatcttgggtatgcattccatagtgagccgtccaacggttgttggaggaaatattgtcccaagaccattgatgtacgtggctctaacatatgaccacagaattattgatggaagagaggctgtgttctttctgcgacgcatcaaagatattgtggaggatcctcgtaggcttctgctcgacatatgaagtgaacctctaattttaaatggagtaaattaaacctcaaaattcaaataccataatgggtacccttttgtttaggttttgaattgcggctgcccgtaatttataatctgtaatgagcaaactctttaggatcatatcccaatttccgttcgatattaattcagcatggttgtgttttttctacctactattcctctcatttaatatgaagagggtcacagtttttggctccaaaattgtatgaaacgactatgaactatactgtaaggattgcccctggagtaataatacgatttcttttcatggcactaaaaaaaaaaaaaaaaaaaaaaaaaaaaaaaaa

SEQ ID NO: 8549 - DNA, 2001 bp, Glycine max
aaatacattacagaattctgaaaagcaggctagaataaatcctaacttgggaatatttttcaacctgaatacaattcagtttacagccacctacatccaaaagcttatattttataaataaactaaaccaatacaatccatgaagaaagaaaaaaactaatcacataaagttaaatattaacaagttcttgcagcttgatatgatttcatcatattgcaacatttggacattcacatattttcaagtttctccaaccaaagaacttgtcttacatctgccctaacatattgacatgaccagttgaccactatgctgcaaataagggcataacttcaattgaatcataattgaagcttctcccccaaaggtcagaagcttacttcaaagcaccattttctagatcaaaccttatataaaggaactgcaaaactgaagcaggaaatccttagtatcctctcagccacaattatccatctcaagtgaccatgaccatacaaacaacaaaagtaaaaagctctagcctataatgctgtatccgaaagctgttatatgatatatttcccagctaaacgtctgaaaaacatatcaatcactcaaacttagccttcacttgacattatttccactaacatggaataaattaaatatggacctagatattttttaaattacactacggttaaaggagctgcaccatcctccttatttccatgaccactcatttttccctggtacagctttaatagttccgcttcttcctccttaaatcgcatcacatacttttcaagaaactccttatcagaaacagcaaatgggacaatcatgctggcactctttttcctcaagcctttagcgactaaatactggacaacaagagcccttggaatgatccttctctccaaactaaatccaaaaatctctggctttttggcaagggccaaagaatcccaacctaactgcttaacccaaaatctcattacccgatcaatcttatcttgggacgctaacataaagaggggctgcctcttgaacataccaataaccaattcttcagaccaaccccagctcttaaagacatcaactttagcttcccagtgcgatttcggaacaatctttttcgcaagcagcgccagcccgaacttcttcttgaaaggctcaaaccccatttccttaatttcatccaaagtctccttaaaaccagaacacaagatcacagaaaaccttttctgtaacaaaaaggcgatgacggagtccgtggctccctcatcaatcaacaacatcacattccgcgacgcacgaccggaaccaaagaaatatccgcaaccacgaatgcaatccatcgttttcttatcggattcaaggaacctccgcaccaactcataggaaggaacaatattattctcgaggttcgcatacaggattgtggggctcttagtcaccagttccacaatgtcggagcctgaggcccctttggagcgtaaaaattcaaactttgggaaaatccttttgtgggggtcgcatgtgagaacattgggtgctcttctaataatgctgattatctgggtgttggagaaactgtggcttctgaataaggcgatgattgaatcgggtttttcgggggttttgaattgggtgaacttggagatcttgagagcggtttctacggagaagccacaagtgcttacgaggtaggaaaccttgaatgggtggtgctgtgaagtggttgaggtgtgtttcggagtgagtgatggtgggaaagtttgattcgatttcggggtttgaagttgaagcagtggtgttcttgtgagtgagttcagatagagaaagggtttgaagcgtggggaaggaaacatcatctgaaaggtgtttaaggaagtgttctatgatttcagagtattaaggcaacttggtgaagggagcatcgaagcttgccttgctgatgggagtgggatgacgcgtggacggacgcgtgggcggacgcgtgggcggacgcgtagaaa

SEQ ID NO: 8550 - DNA, 1384 bp, Glycine max
  misc_feature (730)..(730): n is a, c, g, or t
  misc_feature (756)..(757): n is a, c, g, or t
  misc_feature (760)..(760): n is a, c, g, or t
  misc_feature (817)..(819): n is a, c, g, or t
ggacgggcctgattggggaagaagcgttctcttctctatcattcagaaaagacgagcgagatcttcatttattttatttctatttcaaataaaatcgtgtcttctcctctgtactgagacatggccgaagaagaagaagaagaagaatcagagctcagcgataagcagaaagtggaaatcgcgaaatggttcctcctcaattctcctcccggagaaatccaatacgttgccaaagatgtgaaatccattctcaacaacgacgatttgtacaaggaagccgcttccgaggcttttctcttttacaacaaatcgcacttgatttcccttccaatgtccaaccgaagcggagacgtactggttacttcttttggtgagcttgagggtaatgcatttcttgaacctaggactgcgcaagtagcaattgttgatcatgttaaacaagtttgtacagaggtgagacctgccacagacgaagaacttccatctccatatatcgaagaatttcgatgcaatctggatgctgaaatacttaaatatgttgaagaaacttatccaaaaggtttctgctctgtctactgtgtaagtgggaaggatgtagagggcccgggtgctgattttgagcttgctgtggtaatttctgctgctaggcatagcccacagaatttctgcaacgggaagttggtggtcagtatggaatattgagttcaaagatgaaaaacaaacagtggangtaaagggtaaaatgcaggttggtgnncantattttgaggaaggaaatgtgcagttagatgcaaaacatgaatgcaaagatgcaacnnnttttcaggctcctgaagattgtgcacttgccataacaagcattattcgtcaccatgaaacagagtaccttgcttctcttgaggcatcatatctaaaccttcctgattctactttcaaggatcttcggagaaagcttcccgtcacccgcaccttatttccatggcataatactttgcaattcagcttgacaagagacatcacaaaagaacttggcattggaaagtaaatacacacagaacaaataaaagtttgtgtttactcgatggcgacaagttcctcatatattcactacatgtcatttgatcaagtcaatcattctttgggttgacgttcgttatattcacccatttgcttcatgaagtaccctcctttgtctgagtaagtgagtatcttccactgatgtactgtaattctttttcttttttttttacattatttgtatagcagaagagttcctattgtttctagccaatagccatatcatcataacttcgaaaaatgttatttttagttattgttgattgatttttgtggtatggacgtataatttacagcgattttttta

SEQ ID NO: 8551 - DNA, 1441 bp, Glycine max
attcggctcgagttacggctgcgagagtcagccacgtgggccccccccccattccatttctcattttaaataaaatcgcgtcttctcctctgtattgagacatggccgaagaagaggaagaatcagagctcagcgataagcagaaagtggagatcgcgaaatggttcctcctcaactctcctcccggagaaatccaatacgttgccaaagatgtgaaatcgattctcaacaacgacgatttgtacaaggaagccgcttccgaggcttttccctattacaacaaatcgcacttgatttccattccaatgcccaaccgaagcggagacgtactggttacttcgttcggtgagcttgagggtaatgcatttcttgaacctaggactgcgcaagttgcaattgttgaccatgctaaacaagtttgtacagaggtgagacctgccacagacgaagaactttcatctccatatattgaagaatttcgatgcaatctggatgctgaaacacttaaatatgttgaagaaacttatccaaaaggtttctgctctgtctactgtgtgagtgggaaggatgtagagggcccaggtgctgatttcgagcttgctgtggtgatttctgctgctaggcatagcccacagaatttctgcaacggaagttggtgttcaatatggaatattgagttcaaagatgaacaacaaacagtggaagtaaagggtaaaatgcaggtcggtgcccattattttgaggaaggaaatgtgcagttagatgcaaaacatgaatgcaaagatgcaactctttttcaggcccctgaagattgtgcacttgccataacaagcattattcgtcaccatgaaacagagtaccttgcttctcttgaggcatcatatctaaaccttcctgattctactttcaaggatcttcggagaaagcttcctgtcacccgcacgttatttccatggcataatactttgcagttcagcttgacaagagacatctcaaaagaacttggcattggaaagtaaatacactacattcacacagaacaaataaaagtttgtgtttactcggtggtgacaagttcctcatatattcactacatgtcatttgatcaagtcaatcattctttgggttgacgttcgttatattcactcatttgcttaacaaagtaccctcctttgtctgagtaagtgagtatcttccgctgatgtactgtagtgtactgtaattctttttttgacattatttgtatagcagaagagttcctgttgtttctagccaatagccatcatcatacctaaactttcgtgattgcaattagaaatattgcaagaagctgctactcacattatgattgtgcttattattattgtttaggatgttcttgtctatttgaacgttttattataaaataaaatattccaaagttggattaaaaaaaaaaaaa

SEQ ID NO: 8552 - DNA, 2813 bp, Glycine max
tcagctacgtaggcccccccccccgacgacggtggaagtcgtatcgtgttctcctccattcactattcggcgctctggcaattttccctcaaaatgtttttcatacaaggaaagagaattttgtaactcaatgcagcaagaatagatggcagtcaaagttgaggcttatccattactcggtttagataacaggaaagatcaatccctaaaatctgcaatataaatccttcatttcctgtcgtcatagtaatggaagcggcagcagtggacccttatacaactaatccaggtccaattgatggttcagtactgtatgaccaagacaagcatgtctctgcagcagtttgggatggacaggagcgtggtgccctcagatgtcatgaacatacttcaaagcttgatcagtggacacttactcataaacaggttgagttggtagataaggctggatttggatacttaaggtcaatcccagctattagtctagacaatcctcttatctcagctctagttgaaaggtggagaagagaaacaaacacatttcacttgaatgttggtgaaatgacagtaactcttaaagatgttgcactcttgcttgggctggcaattgatggagaacctgtaattggtattacctataccgcatgcagttcagtgtgtgaaaagtatcttggtagatcaccagagtctggttacacaagtggcggaatggtgaagctaagttggttgaaagagttcttttctcgctgtcctgaagatgctccattggaagtgattgagcaacatactcgtgcatatcttctttatcttgtaggtagcaccatattctccacaactacagggaacaaagtccctgtaatgtatctgccattatttgagaattttgatagatgtgggcaatatgcctggggtgctgcagcattgtcattcttgtatcgtgcactcggcaatgcctcactaaaaactcaaagtaccattagtggctgtttaacactacttcagtgttggagttactttcacctaaatattggacgaccaaagctcaatcttgagctgatgcatgatcgatttccctttgtgcttagatggaaaggaaaacaaagtggcccaactgcaaatcgtgatgtagttttctatcggaagtctctggattccctaaaaccatgtgatgtggagtggctcccataccgaaacatggacagcatggtaattccagaatatatcaaaagcactttaattcttgggaggtcaaagacaatgctgatatgctttgataaggcagaacgacatcttccaaatcgatgtttaaggcaatatggcatgcttcaatctattccagatgatgtggagcggtgggagaggaagagtagaggagttgatggtggcgttgatttgtcagggaaaatggaatccgagcttaatgaatggatggaccgtcaagtgagtattgttgatggagatgagggtgcagatgaaagtgagtacatggagtggtatatgagaatcactcgtaagttcatcggaaggcctatatctctgtcgtctgagtttcatagaacgaatgctggtctgagggatattgcacacatagcggataccttttcaacaaaagggctagatccacaacaaattgaatcaatatcaaggataagatatattgcgcatgaatgtctgagagaccaatttggtggtttggtcatggcgtcagggagcccccaagttgaactaggaaaaagggtcagaggaaaggagagggttagaagaaaaggaggagcgggtaaacgactgcgaaaggatggtgtggttcaatataatgccgttagtgaggatgaacaacctcagtactatggcactgctattgaggttggccaattacatctaagtcatattgagagagagctgagtcatgcacaattatgtagtgttgacaatgaagtcagtgttgcccagttgattcatgcaaatgctgatggtgagaatatgcagctctgtgatccacacattgaggttgatgaatcagatctaggctatgcagcaggtgaagaaaataatgaggacccagatgatgcggctgctgaatttagtcctgaagaactaaagcacagagttggtgaagaaataaagcaagagcttaaccatgtgcctggagaggaaaacatcgaggaactgaatgcagccaatgagattcattttgtggaaccttcagataatatggtgattgataattcacaactttgtgatgttagtcccgacgattcaacgcttccagatgctgctgctgctgaggtcaatcactcacaacttgctgactcaagtggtgtgatcaatccacaccaaagcagtccaactgacaatcttgttaattctcagctttctcacattaaccttgaaagtgaatttctttctgctaaaggagcaatggaagtgtctcaacattcttctattgaaactcgtgaggatatttcacagaatggtgattgtagtgttgctgtatagggtgaatcccttacaatattgtagagaagcaaaattttttaggctgactcaatttaaaggtgtgacccttgtataattatttatattcattttttgatgcatagcttgcagctttttctatgcttgtgaattaaggtgcatgacatgcaacttaatcgctcaggcatccccaatacaatacaagaaatgggtgattatgcagtatcacattccctggttcctctggaaatgggtgtaaatgggagttcaaagtcgctaatactctttttgagtttctatagtgaagggcagaataagagttatcaaggttgtcttcc

SEQ ID NO: 8553 - DNA, 1565 bp, Glycine max
ttttttttttttttttttcaaatataagataaagaagaatttaaaatatgcgtgtcactttacaacatacaaacctctttagaggagggcatacataaattgatcaacccaactccgattacaacacttcgttctccagtatatatacacacacacatcaacattcaacaataaacagaacataaattaaatgttgttgcaattggctgttggattttgcccatttgccaacacaaattatgcataaacaagtgccatgttgcattaccaccttttttttttttttaccaaaagcgaggtcgacagcatgaccttaatcgcaattgcataaaaaaaaatatgaacaatcaaaaagaagcttgtaaccaaagcttgtactagcattctgcatagcggcccccttcccccttcaaaaagttgtcaatttgttctagcgcctcaattgcaatatctgttggagacaattcggacacatctcttttgcccagttttattgctatattttttaatgagaccctggcattggcgttggcgtatgcttcacctctctcttcaaaaagagcagacaaacgcataaaagcccgtgtgtaaggatctcctgcttcatagtgtagaagggggcgagaattagttcctacagctgcaattctctgtgccagggcttccactggtacatccaaccaaacactaactcccttgtgcatatatttccaattgatgggccttgtaacagcacctccaccagtagaaataacaagttgatgcatcagggatagcttatgcaacacctcagtctccttattacgaaagaaagtttcaccatgttgcttgaatatatcagctacagagtttccaccaacctcctcctccaccaatgcatcactatcacaaaatgaataaccaagcacttgtgacattatcttccccaccgttgttttcccagagcccatcattccaacaagataaatacagcgtccatttaaatatggctggatctcttgcgatctattctttagaatcagctcttcatcaagaggagcacgaacacttccagattccaatattgaagctgaaatgttgccgtaagaacaggaaacctccaaagcggttgttctgcggcgcatcatcgttgacgaaacaaaaacccgaaggctctgcggttcccgagacacacccaaacgacatgtgctgggtggtcttcttccaatactttcgggttgaaccaccgctgaaagttgtaacctcggcgcagctttaacatccattgctcaaaccacgcagatttttactcaattgaatccagaaagaacgaatcacaaaattgaagtaacaaacagtaaagaggaagtgaagaagaagaggtgtagagagaaaaaaaaaaatggaagcagaatctaatgggggggggggggcctacgtagctgacctaatattaatatgaatgaataataaaatggcgtcagagtggaaaaaggtatgattatgaattctgaaatgggtttctcatccttttctttctctcatctgtttcttatggataaagatccaattcaatttcagatcca

SEQ ID NO: 8554 - DNA, 2007 bp, Glycine max
aaaaatcctcgtcttgttcctttcttaaaatatcaacagttgttatattacagcaagtaacagcgagcgaagaacccgcgcgtccggaagaacgcagaagccacgatgagtggcagagccattatctcctgtttctctcctccttcaacaactccatgctctgcccccattccagtactctcgcgccgaaaccacctcctccatgcaactccaccttcgccacacctcctctcgcggcggagccacctcgttgttgccggcggcggcggcgggaagacgtgggcaaatgtgaagtccgagaagaacgtgtccgagtcccccaagtacgaggatgatgccgtggttcagaaggcacgtgatttggataacgtggaagaggaagccaggtggtggcaagtgttccccaagagatgggtcattgtggttctctgcttctcagcttttcttctatgtaacatggatagggtaaatatgagcattgctatacttcctatgtctgcagagtacaactggaacccgagcactgtaggtttaatacagtcttctttcttttggggatacctcctcactcagattgctggtggaatatgggctgacactgtgggaggaaagcaggtattgggatttggcgtggtttggtggtctgttgcgacggccctcactcctatagctgccaaacttggattgcctttcctactagttgctcgtgcattcatggggattggtgagggtgttgctatgccagccatgaataatattctgtcaaaatgggttcctgtgtcagagagaagtagatcactagcgctggtctacagtggcatgtatcttggatcagtcactggactggccttttctcccttcctaattcatcagtttggatggccatcagtattttactcctttggttctctagggacagtctggtgttctgtgtggcttagtaaggcacatagttcacctcttgaagatcctgaactgcggcctgaagaaaagaagctcattactgccaactgttcctccaaggaacctgtgaaaacaataccttggcgattaattttgtcaaagccaccagtctgggctctgatagtgtcccatttttgccacaactggggaactttcattctacttacatggatgccaacatactataaccaagtcttgaagtttaatcttacagaatctgggctattttgtgttttaccgtggttgataatggctatttctgcaaatgttggtggttggattgcagacactctagtgagcaagggtctatcagttacaagggtccgcaagataatgcaaacaattggatttctcggaccagctttcttcttaactcaattgagccatgtcaattctccggtgatggctgttttgtgtatgacgtgcagccagggaactgatgctttctctcagtccggattgtattcaaaccatcaagatatcgcccctcgatattctggcatattgcttggtctatctaataccgctggagtattggctggtgtctttggaacagcagcaacaggttacattctacaacatggctcctgggatgatgttttcaaggtttcagttgtgttgtatttggttggaactgtggtgtttaatcttttttcaactggtgaaaaggtcttggaataacttactttcattgatcattggtacttgtcatgccacatgtatagataagtctcgcgtactttcccacagaatggtaaattttgtggatagaggagcattgagcatagatcagagggatggcaatgtgtccgtgaaaaatgaactggcataatttagtccctgatgtttttatcaagggaaaaggtttagatgattctactctcatgcttctgttttttctcccatttttggtgggaagatcatagtggttgcttagtttaaaatcatacttgtaaatattattttcataccaacacatcaattttgtaacaattcaacaagaaaagtgattcatgttattcatcaagcttcgtctgtctctgg

SEQ ID NO: 8555 - DNA, 1918 bp, Glycine max
aaagaataaaagaaacgagcggcagtgaggtaggtccctgttcctgttggaatacacacgcgcttttacctttctcatcaattcattcatcaaaatcactccctacgcttttaaatacaatcgaagagagagtattgttcttaatttcttaatcctccgtcgtgggtggcgatgttgttcttctccggagcggattctcagatccatggagcaggctcatattattaagccaaagcctctcagatccgcggtggcggcgtgacggaaatgaagtcctcaagccgtctcttcacgatcggactggtgtcggcgtggtactcctccaacattggggtactgctcctcaacaagtaccttctcagcaactatggcttcaagtatcctatcttcctcaccatgtgccacatgaccgcctgctccctctttagctacgttgccatcgcctggctcaagatggtccccatgcagaccatccgctcccgcctccagttcctcaagatcgccgccctcagcctcgtcttctgcgtctccgtcgtcttcggcaatgtctccctccgctaccttcctgtgtctttcaaccaggccgtcggcgccaccacccccttcttcaccgccgtcttcgcttacgtcatgaccttcaagcgcgaggcctggctcacctatctcaccctcgtccccgtcgtcaccggcgtcgtcattgccagcgggggtgagccgagcttccatttatttgggttcatagtatgcattgcagctactgccgcacgtgccttaaaatctgtgttacaaggaattttgctttcttctgaaggagagaagttgaattctatgaaccttcttctttacatggctccaattgctgttgttttccttcttcctgctacacttataatggaagaaaatgtggtaggtattacattggctcttgccagagatgatgtgaagatcatttggtatctgctatttaattcagcacttgcttattttgtcaacctgaccaattttttggtcaccaaacataccagtgctcttacccttcaggtacttgggaacgctaaaggggctgtagcagtagtagtttcgattctgatatttagaaacccagtgtcagtcacaggaatgatgggttattcactcacagtcctcggagttgtactttatagtgaagccaaaaagcgaagcaagtgatactgatggtgtcattcatgattctgtggaaatcagcagtgaaatccctatatttgttttcatctctgtgcggacaacctccagataccatgaggcaaatttgttatcatgattatgaccagaatgtttcagactctatataaatttttggccctacatggaaaaacgggttccccattgtattagtacctgtgcagaaatagcccacagtacaaagtttcaataagtgactgatctctctaatatatacccatgttggcatataatcgaggaatgtctttttgtcatttattctttgaagaaagagttgtagaaggatctctactcatttgttgtttacattgcttacatttatttattgatgataaaatttgtatctgggatgcgccaacagcatcatgcacatgaattaatatattgatctttgcaactttttaaaaaaaaaaaaaaaaaaaaaaaaaaaaaaaaaaaaaaaaaaaaaaaaaaaaaaaaaaaaaaaaaaaaaaaaaaaaaaaaaacctccgggggggggccgggacccaatttcccctaaaggggggtggatttccccgcccccatgggccgctttttaaaagcgcgggaaggggaaaaccccggcggtaccccaattaatccgcttggaacaaattcccctttcccccattggggatattagaaaaaaggcccgccccaatccccttcccaaaaattggccccccttaatgggcaa

SEQ ID NO: 8556 - DNA, 1569 bp, Glycine max
ggctcgagtacaagttaacgagttatgggagctccccggacctcagttttaaaggggctttagggcgttaaaaagaaagcgcagagaaaggtgttgttctcagatccatccatcagtggtgggcgatgttgttgttctcagatccagactgagggggtgaaggaaaatgaagtcgtcgaggcgtctgttgaggatcgggcttgtgtcggcgtggtactcgtcgaacattggggtgctgctcctgaacaagtacctccttagcaactatggcttcaagtaccctatcttcctcaccatgtgtcacatgaccgcttgctccctcttcagctacgtcgccatcgcctggctcaagatggtccccatgcagaccatccgctcccgcctccagttcctcaagatcgccgccctcagcctcatcttctgcttctccgtcgtcttcggcaacgtctctctccgctacctccccgtctcttttaaccaggccgtcggcgccaccactcccttcttcaccgccgttttcgcttacgtcatgaccttcaagcgcgaggcctggctcacctatctcaccctcgtccccgtcgtcaccggcgtcgtcattgccagcgggggtgagccgagcttccatttatttgggttcatagtatgcattgcagctactgccgcacgtgccttaaaatccgtgttacaaggaattttgctttcttctgaaggagagaagttgaattctatgaaccttcttctttacatggctccaattgctgttgttttccttcttcctgctacacttataatggaagaaaacgtggttggcattacattggctcttgccagagatgatgtgaagatcatttggtatctgctatttaattcagcacttgcttattttgtcaacctgaccaattttttggtcaccaaacataccagtgctcttacccttcaggtgcttgggaatgctaaaggggccgtagcagtagtagtttcaattctgatatttagaaacccagtgtcagtcactggaatgatgggttattcactcacagtcctcggagttgtactttatagtcaagccaaaaagcgaagcaagtgatactgatgctgtctgtcattcatgattctgtggaaatcagcagtgaattccctatatttgttttcattcctgtgcggacaaactcaagattccatgaggcaaatttgttagcatgattgtgatcagaatgtttcagactctacaattttttggccctacatggaaaaacgggtttcccattgtattagtacctgtgcagaaatagcccacagtacaaagtttcaataagtgactgatctctctactatacccatgttggcatataatcgaggaatgtctttttgtcatttattctttgaagaaagagttgtagaaggacctctactcatttgttgtttacattgcttacatttgtttattgatgataaaatttgtatctgggatgcgccaacaacatcatacacacgaattaatagattgatcttctccacctaaaaagaaaaaaactgatggtcaatgctaaaggccaatcttgtggagag

SEQ ID NO: 8557 - DNA, 1501 bp, Glycine max
tcagctacgtaggcccccccccgataaggtgaatggtggcgcggggcttatccaaggcagcagcagagcgaaggaagtagaaatgcactctcactcacacccacatgccttgccacgcccacattcactactcccttcttcttttcttcttcttcttcctccttcctctctccgcatctccaatactaagaggctgcagtcctcaactttcgccctctcccaaaatgaaaccaaattcccaacgcagccttacaagaattccaacaattcgtctcaatcacttgctcacatctccaattgcaaattccccttggctcggccccttgtttcttcttctcatcccgctagtactaattcatccaccaagcttctcaactctatgctgctcttcgccttcctcacacttcaaccctcttatcctgcacttgctgcttcttctgacttctccactatatttggggatattggtgacttaagcacaggttttgcttcagcgtttctgctaatatttttctctgaactgggagacaagacctttttcattgcagcgctactagcagctaggaactcagctggtgttgtttttattggaacatttggcgcacttgcggcaatgactctgatatctgttgtccttggacgaacctttcattatgttgatgaaatcttgccattcaggtttggagaaactgatttacccattgatgatattgctgctgtttgcctattggtgtactttggggtctctaccctgctggatgcctcatctagcgatggccaaaaatcagatgaagagcagaaggaggcagaactagcagtttctgaattttctggaaatggtgctgggatactatctgctgctagcacagttgccagtacttttctcttagtttttgttgctgaatggggcgacaagtcatttttctccacaattgcccttgcagcagcttcttctccccttggagtcatagctggagcactggctggtcatggtgttgcaactttgctagctgtacttgggggttctttacttgggacgtatttgtcagagaaggttattgcctacatcggaggtgttctctttctcgtctttgccgcaataaccttatttgaaattgtgcaataggggttaaaagaaatgcaatataatctccgtgcaaagggttcaagaacgtaatgacctctagagttgtatgattctgcactctccatttatggcggctacagaaggaaaacaaaatgtactataatcctgcatctgttttaggaatagacttttacctttcaatgcaatcctcataaattatgtcatgctagtcattgaaattttgtaatttcattttaaacgaacattttaattaacataaattatgtgaaacatgatttaattgttgataattattccgtgtattatactggtatttgtaaatggacatgaaatgtaaaaagtattatatattttaagaaactttttatcattcgtaatgagactgatcctttt

SEQ ID NO: 8558 - DNA, 756 bp, Glycine max
tttttcttatacaaatacacagtctcttggatactttgcaattttaaccacattctttacggattggactttagtaattggaaattaaaaataacaacatcttacaaacaataaatgaactacaaatattagtaattcatccttttaataactgcagacacgatcccttttcgtcatacgattgatcctcatctagttcaacagaaattaattacatcctaaagagcaggatggtcatcaaccacccttgagcaacctcttgaccacccaaaagtattgttagcaaacgtttctcactatattcacttctttcccttcttgccctgcttcttttctagttttctcctagcttcagattgtgcaaagaattccctccattcgtcagttagaacaaaaaccggctcatcttcctcttcctcaccatccagcactatatgctccagctcaagtgaaatccgagcatcagaagaaaagggttgttcgttatgatgaagagactcaaaattgggatgcgttttgaggggtgagggagcgaagtgaggaagaggagggaaatatggttgagtttggggtttgatgaagttaacagcgtgaaagtgagggttgtggagagggcagtggtggcagtgacggcggagagggcagtgggagcagtgacgacgtagagggcagtgggggcagtgctgctgtggctgatcggtgtgccgagggcatcgacggcatccatgtgacgccatcgcagttgcaaattgaaat

SEQ ID NO: 8559 - DNA, 2081 bp, Glycine max
  misc_feature (2051)..(2052): n is a, c, g, or t
tacggctgcgagaagacgacagaaggggaattcgtgatttttatatggagataagttttcattttgagagctctgttattccttttattgggcgtatagctccttcagatacttatcggatttggaagcgtgggtctaatcttcgtgctgatatgacccttgctggttttgatggcttacgcatccagcgatcggaccaaacatttttgttccttggagagggctatgttgcagaggaaggtaatttaactctgccacctggttctttgattgctctttctcataaggagaaggaaatcacaaatgctttggaaggagctggtacacaaccaacagagtctgaagttgcttatgaagtttccttgatgtctcagacaaatatgtatagaccaggtattgatgttactcaggctgagcttgttccccatttaaattggaggcgtcaggagaagactgagatggttgggaattggaaggcaaaagtttatgacatgcttcatgtgatggttagtgtgaagtcaaggcgggttccaggtgctatgacagatgaagaactttttgctgtggaggatggagaaagcatgatgaatggggaaaacaatgatgagtatgatgatgtattgactgcagaggaaagaatgcaattagattctgccctgcatatggggaactctgatggtacttacgaggatgaggaacatggagcctttgatggtcaagaaaatggttctgcagcttcctgtgagacttctgaagccaatggtgtggttaaagaaaagaagagctggtttggttggaacaagaaaagtttgaagagtagcagtgatgatcctgaggattccaaagctgtgaagaaaaattccaggtttggctcagaaggtagcaatcagagatcagctgatcagccgaagttagcatctgactttctgagggaggatagtgtagactctaggaagggaaaagataaaaacattaaaaagaagaagaaaaaaggagcaaacaacaatgagtcaaagaatgagagtgagtataaaaagggtttaagacctgtgttgtggttgacgccagacttccctctgaaaactgatgagctgctgcctctgcttgacatcttagcaaataaggttaaggctattagaagactcagagagcttttgacaacaaagcttcctcatggaacttttcctgtcaaggtcgctatcccaatagttcctactattcgggtgcttgtcacttttacgaaatttgaggagcttcagccagtagaggagttttcaactccactttccagcccagctcatttctatgatgccaaatccaaggaatcagagggttctggttcatggatttcatggatgaaaggaagtcgtggggggcagtccagtgactcagatagtcacagatataaggatgaagttgatcctttcagcatacctgcggactacaaatgggtggatgccaatgagaagaaacgcagaatgaaggcgaagaaagccaaaagcaagaaacataagaagcagacagcggcaaaaggtggagatggagtgcagcatcagaggaccgaggacgtagaagaagaacagtaatatcgtgggttggtatctctgggtaaaattggggctttgataattgttgccagacagagtcttgctttgtgcacagccacaactgacattacagttctatgttggagggtttgtccaagaatttactagaaatttctcgggcaaccaattgttattagttaaggaaaaggtgcctttatttttttcctcgtatcacgaagaaagctttgtcttctataaattgctgtattgccagtgaagaggaattgaagagcaagggtgttttgctccctagatctcgcttggcttcattctagttgtccttagataccactatttgtatctacacctatgtcgatgattatcgatttttacattttcgtgagtggtaatctccagttttaactgtttcaagattttggatgttttaaaaggatttatgattgaattgaaagttgcgtggtataagctaaattcattgtttcnnaaaataaaaaaaaaaaaaaaaaaaaaaaa

SEQ ID NO: 8560 - DNA, 1738 bp, Glycine max
ccgtttctgcttattacattacctagcatatattgatcagctacgtaggccccccccccatgagcatcctaagttgtggatggagctacatgtcaaaaacagggagaagcttctcacatcccttcgtcaacacctctccgactcttctcgttctctccatggcttcgtcctccttcaaggtggcgaggagcaaacgcgttacgacaccgatcacttggagctcttcaggcaagagagttacttcgcttacttgtttggagtcatagagcctggattctatgcagctattgacgttgcaactgggaattctatcctatttgctcctaggttaccttctgagtatgctgtttggttgggggagattaagccactctcctactttaaggaacactacatggttaccacgtgttgcttctcagatgaaattgaaagtgtattgcaacaacattaccagtgttccgggaaacctttgctgtttctcttgcatggccttaatacagatagcgataattactctaaaccagcacagtttcagggcattgataagtttgacaaggatttgactactttgcatcctatattgactgaatgccgtgtcatcaagtcagagctggaaattgctcttattcagtatgccaatgatataagctctgaagctcatgttgaggttatgagaaaaactaaagtgggcatgaaggagtatcagcttgaaagcatttttcttcaccacacctacatgtatggtggatgccggcattgctcctatacatgtatttgtgctactggtgataatagtgctgttcttcattatggccatgcagcagctcctaatgacaagattttggaagatggagacatggcgctgtttgatatgggagctgagtaccatttctatggatctgacataacttgttctttccctgtgaatggaaagtttacaagtgatcaatctcttatatatagtgctgtgctagatgctcataatgccgttatatctgcaatgaaacctggaataaactgggttgatatgcacatattagcagaaaaagtgattctggagtcactgaagaggggacatgttatattgggtgatgttgatgacatgatggcttcacgcttgggtgctgcttttatgccacatggtctggggcatttccttggtattgacacacatgaccctggaggctacttaaagggcctggaaagaagaaaggaacctggattaaaatctttgcggacaatcagagatctccgggaaggaatggttatcactgtggagcctggatgctactttattgatgctttgctacttcctgccatgaatagtccagaaacttccaagttcttaaatcaggaagcaattaataggtttaaaggttttggtggagtccgaattgagagtgatgtgcttgttactgccactggttgctacaatatgaccaagtgtccaagggaaatgcgggagattgaggcagtgatggcaggggcaccatggccagctcagaagatctaagtttgacctcacctcacctgtccttgatctgaactggtctgctaagtttgtattttttttattaaataaatattagaaagtaactccactctcccagatcctccatgtaatcacgtgattagtggcaaaaatttaaccaataagcatttcaatgcaaagctcggcattagtaatgttttctttgaaaaaaagtgctatgttgtagagccgcaagttttcggagcc

SEQ ID NO: 8561 - DNA, 1687 bp, Glycine max
ggacgcgtgggtttttttcttacaatcaccgttataatttattccattcttttgtgatgaaattaaggattataatgcaatttttggcaactgatgttctgagctgatgtagctggatttcaggttgatttgcagagagcatggcgtcttgggatcaaatgggggaacttgcaaatgtggcacagttgactggtgtagatgctgtgcggctgattgggatgattgtgagagctgcaagcactgcacggatgcataagaaaaactgcaggcagtttgcacagcatctgaagttgattgggaacttgctggagcagctcaagatctcggagctgaagaagtacccggaaactagggagcctctggagcagctggaagatgctctcagaagatcttatatattggtcaatagctgtcaggacaggagctacctttatttgctcgctatgggctggaacattgtttatcagttcaggaaggctcaaaacgaaatcgatagatacctgcgtctggttcctctcattactcttgtggacaattctcgagtcagggagagacttgaagttatcgaaatggatcaacgtgaatacacattggatgatgaggaccaaaaggcacaaacagttatttttaaacctgagcctgacaaggatgacactgctgtgttgaagaaaacactatcatgttcttaccccaactgttctttcactgaagcacttaaaaaagaaaatgaaaagcttaaactagaactacaacggtcacaagcaaatttggatatgaatcagtgtgaagtcattcaacgtttactagatgtcacagaagttgcagcttattctgttccagccaagtgttcaccggagaaaagtcacaagaaagaggaatacaattactctgatgccaacagtgaccaggaccattcatctgatgaaaaataccatgcaaaaattgacaagcattcaccatcaagatattcagttgcgcaaaaggatctggcatcaactggaggttcatatcagcaggaagattggcacactgatttacttgcttgttgttctgaaccttctctttgtatgaagacatttttctacccttgtggaacattttcaaagattgcttctgttgcaagaaacaggcccatatcctctggagaagcatgtaatgacttgatggcatattctttaattttgtcttgttgttgctatacttgctgcgtaaggaggaagcttcggaagatgttgaacatcacagggggatttattgatgatttcctctctcatttgatgtgttgctgctgtgcccttgtgcaagaatggagagaagtggagatccgtgggcttagtggttctaagaccaaaacaagccctccaccctctcagtacatggaatcttaactaacaaatgagattatcatttggttgttggggattcaaggttccttgaagatcatattaaaatagaggctatttggctattagaattctcacaggaaggcaggaattatgtatttttattcttaccgcacctgacctcgttttaactatgtatagtaattttattttgttgtactcgaaaaaggttgcttttagatatagttgatggtgtatcataaaccttttttttttttgtttccctggtttaatatagtctgaattaatttcttggcagaaaaaaaaaaagaaaaaaaaaaaaa

SEQ ID NO: 8562 - DNA, 979 bp, Glycine max
  misc_feature (7)..(7): n is a, c, g, or t
  misc_feature (954)..(957): n is a, c, g, or t
tcgagtnagttacgtaggccccccccccgataagagcgagcaagagagagacaaagagtgattcagagggagaaagctccctcgcacaaagcaatgcctgccatcacctgaattctatgctccttttccctttatccgcattgctctcttctctttcaccgttttttgtctctgaatatccaagatcttcaaggacaatgttatctctgagaaacatttttctgaatagcgcttgatccggcgtgaaacattcaattgttgataatttactgcttcactttgggctgtgcgagtggagcagcctattttactattaaaggcatattctcttacaaggttgatttgcagagagcatggcgtcttgggatcaaatgggggaacttgcaaatgtggcacagttgactggtgtagacgctgtgcggttgattgggatgattgtgagagctgcaagcactgcacggatgcataagaaaaactgtaggcagtttgcacagcatctgaagttgattgggaacttgctggagcagctcaagatctcggagctgaagaagtaccccgaaactagggaacctctggagcagctcgaagatgctctaagaaggtcttacatattggtcaatagttgtcaagaccgtagctacctttatttgctggctatgggctggaacattgtttatcagttcaggaaggctcagaacgaaattgatagatacctgcgtcttgttcctctcattactcttgtggacaatgctcgagtcagggagagacttgaagttattgaaatggatcaacgtgaatacccattggatgatgaggaccaaaaggcacaaacagttatttttaaacctgagcctgacaaagatgacactgctgtgttgaagaaaacactatcctgttcttaccccaactgttctttcactgaagctcggaaaaaaaaaaaaaaaaaaaaaaaannnnagcggccgctccacaggatcca

SEQ ID NO: 8563 - DNA, 1857 bp, Glycine max
  misc_feature (1631)..(1631): n is a, c, g, or t
  misc_feature (1725)..(1725): n is a, c, g, or t
  misc_feature (1748)..(1748): n is a, c, g, or t
cgattgggtaccgggccccccctcgagtcagctacgtaggccccccccccctttttttattatgttttcctctttacttttttgttgatttatttctgacaacttttaacataagttcagttccagtataaagaagctgagtatgtatgctacttgtttaagttaatggggttcctgctctaatgtgtttccttggatcagttttgatggttactgttactaactaggttttgtcttgttttccatcaaactcaaacataacagggaaatcatttggatttacggcttgttcggaaccaatggctcttaatagaccccaagatacagtttctaatgtcacaggcaaatgaagataaaacatctggagacttcagagaaatgggatttcggcttgcccaggaagtgatcttgttcctgaaaaagaagatggataaagcttcaagaaatggaaacttgaaagatatcaagcttagctttgttggtcattctattgggaatctcattatcaggacagccttgacagagagcgtcatggagccatatctaagatacttacatacatatgtctccatatcgggtccacacttgggttatatgtatagttcaaactctctattcaattcagggttgtggatattgaagaagctcaagggcacacaatgcattcaccaacttaccttcacagatgaccctgatcttgagaatactttcatctacaatctttccaaggagaagacactggctaacttccagaatgtgcttcttttgtcctcacctcaggatggctatgttccataccattctgcgagaatagaaccatgtccagcagcttctttggatttctctaaaagagggaaaatcttcctggagatgctgaataattgcttggaccaaatccaagctcacactaacgatagggtggtcatgcgctgcgacatcaacttcaacacctcttcctatggcaggaacttaaacacacttattggacgaacagctcatattgacttcttggaatctgacatttttgcaaagttcataatgtggtctttcccagatctgtttagacagtaaagaaggaatctacattcaggcaacattattgatttagatagatagtgagattgggacaagactttaagaacatccgaactaaaaacatggcactgtaatcaaaacagttcagagatgcttccaacattgagttggtaaacttccaacaccatctcctcggctcctcacaggaggaaaaaatggtgaatctcatccctcccaaaaatgtgtcctcatgcgaggcagcaaattagaggaatttgcagagcagaaaacttgcatgggaccttaaccattgtaaatcactttttttttttaatatagttatataaattttcttttctcagttatggatggggatacagccttttggccagtaggcagggtgtaggcatgtatgtataattaaaaattaatattcaaagaatcatgagtttaccatgtctattcaagtttatagaagtcgctagttctttaggcttaggaacctagagaaaatgttgtacactaacagatgatattctaagaactttctagagaactttcatccttttacatcagaaaacactttcatttgtccnaaaaaaaaaaaaaaaaaaaaaaaaaaaaaaaaaaaaaaaaaaaaaaaaaaaaaaaaaaaaaaaaaaaaaaaaaaaaaaaaaaaaaaaaaaaatnccggccccccggaaaacccccanccccaaaaggggccccccccgggggggggccccccctttggcccccttaaaaaaggttaaatagcgggccccccccacggggggccccccttttttcccccgaaaaagg

SEQ ID NO: 8564 - DNA, 723 bp, Glycine max
  misc_feature (35)..(36): n is a, c, g, or t
cagagctttagcaggccatgtactctttgggtttnntttgatgcagtagaaacagaaatatttgtcattaattcacaagcttgattccaagaaatttattgaaagaggaaaaaaacgagacattacaaggaaaacaagtcacatccctgaacacaaaccaaaccaaaggaacaaaactctaaaaagtgtatacatgaggattgagggtacatatatttagggatgatttaccccatgtacatgtggatcccaattgctaacatgaagatgcacacgagagcaaagtagaggatagcatggatcaatattgataatccactggtctgaaaattaccaaactctatgaacctgcctcttccaggtatttggaccaagagccctggagtgaggagaatgaaaagcaccacagacacaaaaactggcccccaatctcccatttcctccttctccttaatttctctttgatctcctaattatttcactatctagctatgtgaatggtatagtagttgcaatgacaatgagtgcaggaggacttaaaaaggaatggagctgaaaagtggtcactttggaagaagagacaagcaattgatgacatggaaaaaaaagcaaaggttatagaatgaagctatcctgattcatgttttacacctcagacccacacgcacggcaccaaaattcaagggaagcttcatctatttcccggcccggccggcctcggaa

SEQ ID NO: 8565 - DNA, 1462 bp, Glycine max
  misc_feature (11)..(12): n is a, c, g, or t
  misc_feature (50)..(50): n is a, c, g, or t
  misc_feature (61)..(61): n is a, c, g, or t
ttttttttttnnttttttaaaactgaatgattaatttgaacacaaacganttttcagtgtntttgttttcaccaaaagacaattttccaaaagtagatgcatctgccatagcaaactaggaatgtaattatgctattataagtggtaacatatacctcagaaatatttccatctaaaccaagcacccttcacaattccatttcaataaaactattatttgacaaagatatacacagcctatacaaagtttttaagttactcaccaaaatattgagcattgaccaaaacatcaaatcaaatcacatattaaggtggtcatcagttccatccggatagaagattgaagtcccatcgccctcttcaacaaacctacatattgagtcaccaagctatgacacttcttcagccaagagtcaccactcatcccatttagttaagaagtcatcccacatagatgaagcaattgaatccctcgatgagaatgcaagttgttcttgtattgaagatagcatcggcacatcgggaagttcatcaatatctgaaatttcctctactggagagcccccaacactattgaatatccagtcatttctttcttcacggcggatgaaattgtgcaaaacacatccagctatgactatatcgcgctgaatctgaaaggaatactgaggagcaagtttcaggattggaaatctagttttcaacacattaaatgacctcaggatagcattcctcagaaaacaatgcctgtgattgaacagctcttttgcgtttcttggtaattgattagcgcctctaaactcataatgctggtaccgaaccccttggtaaggagcaataaacccttctgtatttaaatatcccttgtcaacaaggtaatactttccttgaggtatttgagggaaattctgatctgggttatcaaggactgcccttaacactcgtgagtcggtgacagaaccttcccaaccaggataaacaaatataaactgcaggtcaaatgtgcatgctgccagcacattttgagataggatacctttcttattgcggaaccgagattgatctttggctggaacatgagccggaatgttcataccatcaattactcctatacaatccttgaaatatggataaaatctagcattgttggggggccctcgtagcggctcgagctgaggaggttgcaaaacttcacgtgacaatgatttaatagcctttaatacattgttaaaatgacggctaatggtttcaccagagtgttgaaacctctcttgaatcactctattgcgctcattatgaccaataacgtttaaaaaaattgctagctgctcctctatcattacgccagcagtatcacgcaacatggctctctgtcggagaatgtcacacaacttgtgaaatacatgcttgtccatacgcaacatttcccgacaaaagtcaccatgcccattcagcctcgtgc

SEQ ID NO: 8566 - DNA, 1769 bp, Glycine max
  misc_feature (1748)..(1752): n is a, c, g, or t
  misc_feature (1755)..(1768): n is a, c, g, or t
aagactcaccacatcttcttcccaaccactactactcactcactgcagatctcaattgcatcgctgtccatggctaccatcgttagcatcaaggcccgccagatcttcgacagtcgtggcaatccaactgtcgaggtggatttgacttgctccgatggtacttttgccagagctgctgttccaagtggtgcatccactgggatttatgaggcccttgaattgagagatggaggatctgactaccttggaaagggtgtatcaaaggctgttgacaatgtgaacaccgtcattggccctgctttgattggcaaggacccaactgagcagactgctattgacaacttaatggttcaacagcttgatggaactgttaacgaatggggttggtgcaagcaaaagctaggagcaaatgccatattggcagtgtctcttgcagtctgcaaagctggtgctagcgtcctgaaaattcctctttacaagcatattgctaatatcgcgggtaacaaaaagttggttttgcctgttcctgctttcaatgtcattaatggtggatcacatgctggaaacaaacttgctatgcaggagtttatggttcttcctgtgggagcttcctcgttcaaggaagccatgaagatgggtgtagaagtgtatcacaatttgaagtctgtgattaagaagaaatatggtcaagatgcaataaatgttggtgacgaaggtggctttgcccctaacatccaggaaaacaaggaaggcttggaattgctgaaaactgccatcgccaaagctggttacacaggcaaagttgtcattggaatggatgttgcagcttctgaattctacaaggaagacaaaacatacgatttgaacttcaaggaagataacaatgatggctcccagaggatctctggagatgctttgaaagatctgtacaagtcatttgtgtcagagtacccaattgtttcaattgaggatccatttgaccaggatgactgggagcactatgctaagctaactgctgaggttggagccaatgtacaaattgttggtgatgatctcttggttaccaaccccaagagggttcagaaggcaattgatactaaagcatgcaatgctcttctcctcaaggtcaaccaaattggttctgtgactgagagtattgaagctgtcaggatgtccaaaaaagctggatggggtgtcatggccagtcacagaagtggagagactgaggataccttcattgctgacctttctgttggtttggctacgggtcaaattaagactggagctccatgcaggtctgagcgtcttgctaaatataaccagctcttgagaattgaggaggagcttggtgctgaagcagtgtacgccggagctaacttccgtacccccgttgaaccctactaaagttttcaagtggaaaaaacctggagatccacacgagtttgagcattgagatttgggtgcgcggtttttggtgtgatatataagttgatagttggaacattagtcttggtatgataaagaccttgccaataatttgagttctgattcacagagctaggacagttatgtcttaagactttgaaaggtgtttaatgatatttagctttaatacttgaagcctacttacagtttatttccaattttatgggctatccccaaatatttcttaaaaaaagaaaaaaaagttttattccttgatccgtgatctcaaaaaaaaaaaaaaaaaagaattcctgcagcccggnnnnnaannnnnnnnnnnnnnc

SEQ ID NO: 8567 - DNA, 1313 bp, Glycine max
tcagctacgtaggccccccccccccatagtacctgctggagaacaggccaattctgtacagccaatccgcgcgtccgctgaaagatttcatgctttgtgcgtgaaggatagtggtgttctatatgaggatccttatattcagattggcattaaagcagaatggagagctcatcaagggcatcttgttcttttcttgggaaacaagaatacttctcctcttgtctctgttcaagctttaatattgcctcccacgcatttgaagatggagctctctctagtaccagaaactatacctccccgggcacaagtgcaatgcccacttgaggtcattaatctccacccaagcagggatgttgccgttcttgacttctcctacaagtttggtaacgatatggtcaatgtcaagcttcgcctacctgctgtcctaaataaatttcttcagcctataactatatctgctgaagagtttttccctcaatggagatcacttcctggaccacctttgaaacttcaagaagtggtcagaggtgttagaccccttccactgctcgaaatggcaaacttattcaacagtttccatttgacagtttgcccagggcttgatcccaatcctaacaatcttgttgtgagtacaacattttattcagaaagtacaagggcaatgctttgtttagtaagaattgaaacagatccagcagacagaacccagctgcgaatgacggttgcttcaggggacccaacactaacatttgagatgaaggagttcatcaaggaccaattagtcagcattcccgccatagcaacccgtgtaccaacacaaccagctccgacatctccaccactggcccaaccaggcagtgctcctgcagcattgacggatcctggggcaatgctggctgctcttttatgacaatatagaggtgttcattaattattacacatttgtaaacctgatctacacagcctaacccatgtctccctcaaagctagtgaggtgaatagacaaaatcatgatgcaagggctggcggaattaagagtgagcttgtttaccagctgagtgtttgagcagggatttctgggttggtgggcatttttgagattctttctgcacaaagtgattgtcctttaagcaagattttatatcagttgggccggggttttcagttttctcatatttttccccttcccagtttcactggattgtttgtggtgcacctgatagcatgtaagatattgcctttgatagaaacaattgtaagtttgaaattgatactttgacgttacatacaataatagcttgtggagtaaggac

SEQ ID NO: 8568 - DNA, 1360 bp, Glycine max
  misc_feature (58)..(58): n is a, c, g, or t
  misc_feature (63)..(63): n is a, c, g, or t
  misc_feature (1143)..(1143): n is a, c, g, or t
  misc_feature (1162)..(1162): n is a, c, g, or t
  misc_feature (1179)..(1179): n is a, c, g, or t
  misc_feature (1181)..(1181): n is a, c, g, or t
  misc_feature (1192)..(1192): n is a, c, g, or t
  misc_feature (1203)..(1203): n is a, c, g, or t
  misc_feature (1205)..(1205): n is a, c, g, or t
  misc_feature (1216)..(1216): n is a, c, g, or t
  misc_feature (1234)..(1234): n is a, c, g, or t
  misc_feature (1248)..(1248): n is a, c, g, or t
  misc_feature (1254)..(1255): n is a, c, g, or t
  misc_feature (1270)..(1270): n is a, c, g, or t
  misc_feature (1277)..(1277): n is a, c, g, or t
  misc_feature (1285)..(1285): n is a, c, g, or t
  misc_feature (1290)..(1290): n is a, c, g, or t
  misc_feature (1302)..(1302): n is a, c, g, or t
  misc_feature (1308)..(1308): n is a, c, g, or t
  misc_feature (1310)..(1311): n is a, c, g, or t
  misc_feature (1324)..(1324): n is a, c, g, or t
  misc_feature (1335)..(1335): n is a, c, g, or t
  misc_feature (1337)..(1337): n is a, c, g, or t
  misc_feature (1339)..(1339): n is a, c, g, or t
  misc_feature (1347)..(1347): n is a, c, g, or t
  misc_feature (1353)..(1353): n is a, c, g, or t
tcccggggtcgaacccactgcgtccggtcttggaacacctttctaagcaagaacgacnctggnactgcatgtccgaaaggaaactactttactatttagcattatacatgagaagcttcctactgtatcgacttctactatttctattcttttgtcaacatatgctaaaattctgatgcacagtcaaccaccagaccctgaattacagaatcaaatatggacaatatttaagaaatatgaaagctcaattgaagtcgaaatacagcaaagatctgttgaatattttgcattgagtagaaaaggtgcagctctaatggatatattggccgaaatgcctaaattccctgaacgacagtctgcattgatcaaaaaggctgaagacactgaagtcgatacagcggaactaagtgctataaagttacgagctcagcagcaatcccaaacatcaaatgctttggttgtaacagaacaaagtcatgttaatggaactccacctgttggccaacttagccttgtaaaggtgcccagcatgagtagcaatgcggatgaggcagatcaaagattatcccaggaaaatgggactttgagtaaagtagattctcaacctccctctgcagatctccttggtgatctcttgggtccacttgctattgaaggccctcccggtatcagtgtccaccctcagccaagctccaattcaggattggaaggaactgtagttgaagccacggccatagtacctgctggagaacaggccaattctgtgcagccaattggaaatattgctgaaagatttcatgctttgtgcatgaaggatagtggtgttctatatgaggatccttatattcagattggcattaaagcagaatggagagctcatcaagggcatcttgttcttttcttgggaaacaagaatacttctcctcttgtctctgttcaagctttaatattgcctcccacgcatttgaagatggagctctctctagtaccataaactatacctccccgggcacaagtgcaatgcccacttgaggtcattaatctccacccaagcagggatgttgcgtcttgacttctcctacaagtttggtaacgattggtcaatgtcaagcttcgcctacctgctgcctaaataatttcttnacctatactttttgctganagttttcccttaaggananacttctggacnctttgaacttnanagtgtctaagntttaaaccttccatgctnaatggaaaattatnatattnncatttacatttgccngggtgtntatattantcctnttttttttgttnttcctngnntttaacacactantaatttgtttncngnttgtttgnccattnatctgtg

SEQ ID NO: 8569 - DNA, 1514 bp, Glycine max
aagttaacaaaactcagctcaattatttcacaccatataataatcacttggaaacaaccgcgctaaggttggaacttggaggaacttgtgtctgtgtgtccttttttccagagtcatggctatggctttgagtctctcccaattccctgttcgtgggtctgtttctttgcccaaaagaagactacccagaagaagcttttgcattaggggcatgtcagaaacctcttccacttcttctgtgagcacccaacaagaacaaccaacttctgataatgcttcttcagtgacaattgctcctccccctaacttcaagccccctgagcctaaacgctttgcaattaggcctgataagaccagtgaagtgtttggagctttgcttcctttgatctttcgttttgccactggagttttcgtttctgggtattctttttcaattgtttctaaggatgaaattcctacagacgaatatgctttggaacttaatggcgttaccataaaagaaacagcaaaattaggccctcgcccagagaagcctattgaaatatatgaatttgagagctgtccattttgccgaaaggttagagaaattgttgccattttggatcttgatgttcttttctatccttgtccaagaaatggcccaaatttccgtcaaaaggttctagagatgggtggcaaactgcagttcccctacatggttgacccaaacacaggcgcttcaatgtatgaatcagatgacataattcggtatttggttgacaaatatggcgatggaaacgttcctttatctttatcacttggatttttaacgacactaacggctggtcttggtatgcttagtcgtatttcaaaggggactacttatactccagcgaagttccctccaaagcctcttaaattatgggcatatgaggggtctcctttctgcaaacttgtacgtgaagtacttgtggaattggagctgccacacttgcttgtcagttgtgctaggggtagcccaaagagacatatactttatcagaaaactggaactttccaggcaccttttttggaagatccaaacactgggatagaaatgtttgaaagtgcagaaatcatagagtatctaagagcaacatacgctctttagtaagtgatgctatgatagggagaggcttgtaagggtttttaagtctcatgatatgcaccttcatttccttttgtaaatgtaattgctaatggttctaagttctaacgggtaaatcaaattttctctatatagaaatttcaaatagtggaatcaagtgcctcaatatttagcaatggtttgaggtggttaaaaatgtgggttgctaagaaaaaaaaaaaaaaaaaaaaattatttgggacccttttcaatttcattcatcattattgcgcctacagctctaataactacataatgcccttgaaaatgatttttcattcttcaagtttgaacaatttattacgtttaaacaggggtctctactttaatggattgagtatggttcatg

SEQ ID NO: 8570 - DNA, 1644 bp, Glycine max
gcagttaagtagtggctgcaagaaatatatatataaagaaaaacaaggttggcacttggaagcatatgatccactgattccactcagtgaattatgaagtgatctgaaatcacccgcgaagccgttaggataaggcaaagagagagaaacaaagcggcttccaatggcgactctgcggctcaccttctccgactcaaccaccttgttcaggccttctctaccttccacgcgaaccttctctcgaaaccgaagcctcattgtcaaagcctcttcttctgaagacgatttctccagaagcagcagaagacgcttcatcgccgaaaccgccgcactctcggtctcgctccctcagttaacggcgcgttctgaagacgcgctttcggagtgggagagagtgtacctccctatcgaccccggcgtcgtgcttctcgacatcgcttttgtccccgacgaccccaaccacggttttcttctcgggacgaggcaaaccattctggagacgaaagatggaggaaacacttgggctccgcgttcgattccttctgctgaagacgaagatttcaactatcgattcaattctatcagcttcaaagggaaggaagggtggattgtcggaaaaccttcgattctgttgtacacttccgatgccggagacagttgggagaggatacctctcagtgctgaacttccaggggatatggtgtacataaaggcgaccggtgagaagagtgcggagatggtgaccgacgaaggtgcaatatatgttactgcaaacagaggttacaactggagggctgctgtccaggaaactgtgtcagctactcttaacagaacagtttctagtggtattagtggtgcaagctactacactggaactttcaatactgtcaatcgctctccagatggaaggtatgttgcagtctcaagtcggggaaacttctacttaacctgggagcctggtcagccattctggcagccacataatagagcagttgccagaagaatccagaacatgggatggagagctgatggtggtctgtggcttcttgttcgtggaggtggtctttatctcagcaagggcaaagggttaactgaagaatttgaggaggttcctgttcaaagccggggttttggcattcttgatgttggatatcgttcaacggatgaggcttgggcagcaggaggaagtggtattctcttgagaactactaatggtggcaagtcatggatccgtgacaaagctgccgacaacattgctgcgaatttatactcagtgaagttcattgatgagaagaagggatttgtattggggaatgatggagtcttgctccgctaccttggatagagttgtaatacaacatggtttgttgcctcaaatgcaattttgtagcagattacatatccatgctttacattcattactgtggagaagcctatgggatcaaattgactccttgctgttgggctaaaaaaatgcgaggaagtataacaaacttcactactgtaaagagagttatattatgtcaatgtaaaattgtaattgccacgttactattatattaaaattcaattttatgctacaaaaaaaaaaaaaaaaaaaaaaaaaaaaaaaaaaaaaaaaaaaaaaaaaaaaaaaaaaaaaaa

SEQ ID NO: 8571 - DNA, 1563 bp, Glycine max
cccacgcggccggaaatcacccgcgaagccgttaggataaggcagagagagaaaaacaaacaaacaaagcggcttccaatggccactctgcaattcaccttcaccgactcaaccacattgttcaggccttctctaccttccacgcgaaccttctctcgaaaccgaagcctcattgtcaaagcctctccttcttcttctgacgacttctccaaaagcaggcgacgcttcatcgccgaaaccgccgcactctcggtctcgctccctcagttagcggcgcgtgccgaagacgcgctttcggagtgggagagagtatacctccctatcgaccccggcgtcgtgcttctcgacatcgcttttgtccccgacgatcccaaccacggttttcttctcgggacgaggcaaaccattctggagacgaaagatggaggaaacacttgggctccgcgttcgattccttctgctgaagacgaagatttcaactatcgcttcaattccatcagcttcaaagggaaggaagggtggattgtcggaaaacctgcgattctgttgtacacttccgatgccggagacagttgggagaggatacctctcagtgctgaacttccaggggatatggtgtacataaaggcaaccggtgagaagagtgcggagatggtgaccgacgaaggtgccatatatgttactgcaaacagaggttacaactggagggctgctgtgcaggaaactgtctcagctactcttaacagaacagtttctagtggtattagtggtgcaagctactacactggaactttcaatactgtcaatcgctctccagatggaaggtatgttgcagtctcaagtcggggcaacttctacttaacctgggagcctggtcagccattctggcagccacataatagagcaggccccagaggaatccaggaacatggggatggagaagctgaatggtggtctgtggcttcttgttcgtggaggtggtctttatctcaccaagggcacagggttaactgaagaatttgaggaggttcctgttcaaagccggggttttggcattcttgatgttggatatcgttcaacggatgaggcatgggcagcaggaggaagtggtattcttttgagaactactaatggtggcaagtcatggatccgtgacaaagctgctgacaacattgctgcaaatttatactcagtgaagttcattgatgagaagaagggatttgtattggggaatgatggagtcttgcttcgctaccttggatagagttgtaatgcaacatggtctgttgcctcaaatgcaattttgtagcagattacatatccatgcttaacattcattactatggagagagctatgggatcaaatcgactccttgctgttgtgctaaaaaaatgtgaggaagtatataaacaaacttcactattgtaaagagagctatattatgtcaatgtaaaattgtaattgccacgttactattatattaaaattcaattttatgctgcatgtgttgtactgcaaaagcgcttattcaatataagagttatcacacgagagtttatcac

SEQ ID NO: 8572 - DNA, 1778 bp, Glycine max
caagcgtccggaacgcgctaactgctaagttacgccagcgacgcgcgcccccccccctctatcgtctcttcttttttcttcttcttcttcttcttcagagtttagccagttgaattgaactagtagctttcttttaaaattaaaattagaatcattatcgtttatcacactccaacaacgcctttcgctcttaccaccctcgcgggtcattttcttgggaaaactcgtttccaccaagaaaatcgatttccctggaaacaaacactcgcgaatctccgatgcgactcgtttcactttaattcgatgatgatcgccactatatgccgccctgtgcgttccccgtgggaggaaccaatggatcgctgcttccgattttttccatgcctcgccgatcctggtcgaaggtcttcgttgtgcttgaagttgtgcttagtgacgattcacctgatttatgctggcgtgctcttcttgttcgatggggatttgatagaaaggactaagaaggagccgtggtacactgctttatacttgctgctgttcgttgttactttgatacaatactttgctacctctctttcttctccaggctatgtacttgaagccatgctgactgttaacgagagaagtgcagcgaacagaaaggcaccagaaacatcgaaaaatgggagctacgtaatttccacagagggaaatctgattgcaagaaatggttcaggaagctattcatcatcttggtcgaagttggtggctgacttgtatcctttctcgatcagaacatggacatgcacctactgcaatatggagcagcctccacgagcaaaacattgtcatgattgtgacaagtgtgttcttcagtttgatcatcattgtgtttggcttggtaactgcattggccagggtaatcactgtaaattttggtggtacctttttgaagagacagcattgtgcctttggactggtgtcttgtatatttcatacctgaaggctcacattacaagggtttggtggcaggatgcgatcatgataattctcttgatcactctgttagtttgtctcgtctttcttctcctcctactgctattccatagttatcttattttaacaaatcagactacctttgaacttgtaaggagaagacggattcattatctaaggggaattccggaaagagtgcatccattcagtagaggagttcgtagaaatttatacaatttctgctgtacaaggagcaccatatacggagtcgaaccattgcctacccctgaagagatagaggaaaaatcaaggccgtacacatgcttggatgctgtaacttgtcgatgttgttgatggtttttgtacaagtagaagtctttccgtctagtagtttaatcgtgaaaactcagaagtatgtcgatgtacccttttgctttagatgggtaggtgttatctttaggcaatttgcttcatgacatcttctgttcttcattttttccctaaattttggaggtagagttccaagttagatgtacagttgcagtgctattgtgttgttttgtttttactgtttagtctgtagacctggatatccagctattatcaaaccgactactgcctggaacgctagagacagagaatttattttagttagttgcatgccatggtgggcgttggcccccctcaacacttattacagtctcatgaattcactgttattttacccccagaacttatctagctccactcctggtgcttgcagttgaagtggcagctttgcactcttgcttatattatatttg

SEQ ID NO: 8573 - DNA, 681 bp, Glycine max
cccatgaccaacaagtctccaaggcacaactttaccgttgcaccaaaataacaatattttgccaaaatctaacaatttaccattatgaaaaaaaaatgtgactatgtgagacacattgcatttccatagtttaatccatatgaaaagcaatacctgttaaaaagattggcaacctcttcacattcacgtgcattatagaaccagataccattcacttcttgagcagcatttctatacagtaaatatggaatctgaacttcatactcaaaatcgcccaagagattctccaccaaattttcagtattgcgacggttcatcacaataaactgaaatcgaggttgtgtgttcctcttgacaacgaagagagatccttcaacgtccttgcggctccattgactgaggtcgatgttgaactcgtagaaggtgacatgtgcggcggtgatgagaatttcttcaacgaaggggtcgattcgttggagaacagtgagattgagaagcttggtgctgtgctggtctagatttggcatcagcttcccgttttgagacattttaggttcctctctctctgaaccaaaccctagaaatttggagagagcaatgcaggaagcaggttgaggttgagtcgatcagactcagcttcttcccaaagaaaatcccttctgcttgctaaatgacacccac

SEQ ID NO: 8574 - DNA, 1850 bp, Glycine max
tcgcagcagcgtagtagctcgaatcggctcgccacggcttctcagaaggggtaatcttatattaacaatgtctaaatatctaatttgtacattggtagcctcttgttccagttgttggtgcagaagaaggccagtggctggtcaccaaaccattcagtcccttgagtaagcctggtggtcatggtgtcatatggaaacttgctcatgacaaaggcatcttcacatggttttactgtcaaggaagaaaaggtgcaactgtgcgccaagtcagtaatgtggtggcagccacagatttaaccctcctagccttagctgggattggcttacgtcaaggaaagaaactgggatttgcatcttgtaagcggatcttgggtgccacagaaggagttaatgtgctcatggagaagaaaagtcttgatgggaactgggaatatggtgtgtcttgtattgaatacactgaatttgacaagtttggaattactaccggacctcttgctccaaaaggtttgcagacagagttcccagccaatacaaacatcttatatattgatttgccttctgcggagctagttggatcaagtaagagtgaaactagtttacctggaatggtgctaaatactagaaagccaatagtttacacagatcagtttggaagacgtcatagtgtctctggtggtagacttgagtgcacaatgcaaaatatagctgacaattattccaattcatattcatccagatgttataatgatgtggaagataagctagatacatatattgtatacaatgaaagaagaagggttacctcctctgctaagaaaaaaagaagacatggagacaagtctttacatcagacacctgatggcgctctattagatatcttacgaaatgctcatgatcttctttcacaatgtgatataagacttcctgagattgaagctaacgagaactatgttgattcgggaccaccatttctcatccttctgcatcctgctctcggtcctctttgggaagtcactaagcaaaaattttatggtggttccatatcagagggctccgagttacaaatagaggttgcagagtttttctggaggaatgttcagctcaatggaagcctgatcataatatctgagaatgttatgggctcaatgaagattaatgagaacggtgaatccatactacattatggccaaaggtgtggaagatgcaaattgcaaaatgtcaaggtattgaacaagggaattgattggacttgcggtgaaaacatatactggaaacacgatgtgcagcgatctgaggtgctgcagatcatactgcatggaaatgctgaatttgaggctactgatgttgtcttacagggaaatcatgtgtttgaagttccagatggctacaaactgaaaatcacgccaggaagcccaggtttagcaatcaagttggatccaattgatcaagatatgatggagagtggaagctggcactgggattacaagatagaaggttctcacattcagctagaattagtagaatcataaaccactaaccactttaaatgtctgctgcgtgaatcatggttcacaactggcattggggttcattacctaaataatttcgattaccaagtgacaggttgaacagaagttaagcctttgtcacttttggttgttttaattgtaatatgttggtaggtttgtaaaatccgtgtcacttccctcgtgttcttctatttttccattctttccccccttttatttattgggatgatctcatgtaaccaacattgttaaactgagatcaattcaatcaatgaatatggatctatttcgttaaaaaaaaaaaaaaaaaatatcctttga

SEQ ID NO: 8575 - DNA, 973 bp, Glycine max
cccacgcgtccggggtgagtgggagatattttgatttgagaatggcatcagcgtgtctgaaattgagaaatttgagcagaggaggaggagcatttaggtgtgggcgttattcgaagttgatacatgcagagagagagagagaagaagaagaagaggaggtgccgagttctagaatctctaggccgctctctgaaatactgaaagagctgaacaagaaagtaccggactccctcgtcaaaacccgcctccagaaagatcaagatgcctcccccatcagattcattccctggcatgttgtcaatcgcattttgaacttacacgctcctgagtggtctggtgaggttcggaatatcacctattccgccgatgccaagtctgtctccgttgtctaccgagttaccctttatgggactgatgctgagatatttagggaatcaactggtactgcttcagtagaagacacaagttatggagatcctgtacagaaggcagaagcaatggcttttcgtagagcttgtgcacgctttggactggggctccacctttatcatgaagatgcatcataattaaccagcagttctgcttctcagcttcaatgttttgatgatggccatcgttttcttttttgcctatagttatgatcatttgtgatcatattgcaacactagaagggaaatattttgttgtaacctgatggagacctactaagcttcaatcactgtatgcaaggtttgccatattttttatcctttgaacttctccagttatctgccatgcaattgggagaatttatgttctattacacatctgatgtagaacagttagaacagttttatgcaacctcgttcattgtggtatgtaatgctaacggctgtacttatgacataggttctgggaacaaaatatgttccgtgcgggtgctgatgtatttttaaaaacaaaatactatttttagttaaacaaaaaccctcct

SEQ ID NO: 8576 - DNA, 1449 bp, Glycine max
gcaactcaacgaacggcaaatgttcatatggctacaaactccaatgtattgaagaaatataatctcaaaaacttagagaaataagcattattagtaactacgtcgtcaaatacgtataacatagaggcccagaaaaccaatacctgaggtcccaaaatgtctcaaccctacatggcttaaagtattaaagaaaatttctgtgcaaaccgttcatagataaaattagattttgattttcaaaaatcgtcataaagcaatatctgctacactccattgcttaataacattgaccacccattagtttcaatcagctgctctataatcttctttaacgctggagcactaacaacgcaatcttttttagcaaagcaggatgaaccctcttcagctgccttacaaagctgtggatctaaaggaactttaccaagaaaggttacccccatatcattgcacattttcactgctccaccaccactactatcaaatacttcagtgcaagcaagcaaattcagcatttctggcgctttttctctcatgtattcccaaacccactgtgtaacatctttctgctcaccattatcagtcaacttcataaacttgaaatctgtgatgggcaggcacaggccactcatattctctacaaccccaagaactttcacgccaactttcttgcaaaaattcacttcttttctcacatcaataagagagatttgttgaggagtagtgactatgattgcaccatctattccagtggcatcaaggcattgaacaagggaaatgtgttcatctgaggttcccggtggagcatccacaattagaaaatcaagttcaccccagtagacatcttttagaaactgcttgataagtccatttttgcgaggacctctccatataacagcttcatctggattgggaagcatgaacccaactgacatgaccccaaggttggactccacatagacaggggaccaaccaaggttgctctgatgtatctcttgaccttctaggccaagcatctttggaatgcttggaccacagatatcaacgtcaagaagacctacctgaaaatcccttgctgctaaagcaaatgccagctgggcagagaacgtgctcttgccaactcccccttttcctgataagaccaatatcttatgtttcacagtagccattctttctgcaatggcaaccagatcagggtcagggcctttgggggcagtggcacaaatttgctgattcgggcacccttcacatgcatcggattttccagcagattcagactgaggacctgggcaatgctcgttggcattctcagggatgtctgcattctccatggaagctcctctgttgtgttgaagaaaaaagtgtaactatctgtggtgacgcggttgggcaactacacaaggcacagcgtcgtgtttggctcttgggggggggggcctacgtagctga

SEQ ID NO: 8577 - DNA, 1723 bp, Glycine max
gacctattctttctggtagtagttacactagtgtttcgttgtatcgaaaggtgtcatttaactgctttgatctgtctatgaaatcagcattccatatttccacttacaactttatttgaaaaaacgacttgtttatctatttcccatcccaagttcaatagaaatgtaacaaccaaatacgattgctcgtgacaacccgctccttaaatgtgtttcttcatttcaagtctcttccataagcttctgtaaaatcctccaatatcgcatgcaagaagggttcatgtgaattgctcgaataacccatctatgaggactctgagtggactctatgctagcgtttggtccaactttcaactgtcgtgcaagcatatgcatttgaaagtagagctctgcaggcctcatttctggtggccaattataccattcaagccgaaggtttctgttccacctctccttagaaccatggcttccttctgcttgagctaccaataccgagacaaaaggtaagggaataagtgaatgctcatgaactttggtaagactattaatggcccgtgataggaactgagaaccatggcactgccgaacaagttccatacagatggcaccatgacatagaaagaggcagctctcaaaacctgctaatgaacaagcctgtgccatgaaatcttctgctgagactaaatccctcttctgcaaggaaatcatacctctcaccaggttatatacagccatccacatattgcacaactttccacttcttttaacacattcttcaaagttcaagtctatggtatttgaatcaatttgcagttcatattgacattccataagtttgagacagatccaaccaatgtgataatctgtcttgagctccaaacaccttatatattctttttgaaaacttagatgatcacctttcatggcatacacacggcataatagtagatgcgcaaagaataaataatcatcaggaagcacaagttcagaagcctttttggcatgggtgatacaagtcatatgattcccacattgtaaactgatctcagaagcacaaagtagaagttggaagtatctatatcgatacaacatttctgtcctactatacaaatcatttgaaggagcagcatgagttagacgatttagtatgcgacaaagatgatgaggaaatctttgctcacgtgccctctgaagatagttaagaacaagcaagtagcgggaatcatgattccatggtttctgatgaaagcacttctgcaggtgtctgatagctccgggatgattagaacactgctttgtacatgttggaaaggtgaactttggaatgctgttgccagtggtatagcaagcaactgctcctgcaccatgaatatcagaagctgatttgaaacctttttgatcggaaagatcaagatggtcaagtttacaacaccttgttgccacatgacaattgtttaactccttactggataccatgaggtagccaagaaggttccttatcaaactacagttagggaacatgtgcagagcttttttgaggtgagcaactccactctgaatgtcaaggcagcaatcagactcatttttcaccagtttacttagtgctattaaaaggtgcatcccagcaatttcttcatgatattgagaaaatatcggctacttgagacaacaaatccaagacgattttgtctatcaagaggggggggggggcctacgtagctga

SEQ ID NO: 8578 - DNA, 1047 bp, Glycine max
gaataataatcagaacaaaaccaaccatttaaaaaaacaaaaaaaaagaaatggtggcagagaagctgatctgaaaggaatggcgttcatttggcggttctgtggtgtgtctctatgcaacttcacagcctctaatgcccagaaaggtccttctccttctctgcccataaccttggacttggagcatcatataacaaccccatctttactttcttccatcgaagaagaagaaggacgcgcggttaataggagacaacttattcttcacacgccagtagctgcagcagctgcatttgcagtcccaaatgcattggcactcaatgatgtgtctgaggatgttcgtgtctacactgacgatgagaacaagttcaagattgagattcccgaagagtggcaagtgggaacaggagacggagaatctagtgggtttaaatccataactgctttctacccaacacaggcatccaattccaatgtgagcgttgtgatcacagggctgggaccggatttcactaggatggaatcctttggcaaagttgacgagtttgcccagactctagttagtgggcttgacagaagctggcgaaaacccccgggtgtggctgctaaactcatagattgtaaatcatctgatgggatttattacatcgagtattcgctgcaaaatcccggtgagagtcgcaggtatttatattcagctatcgggatggcatcaaatggttggtataacagactgtatacggtgacaggacagtatgtggaagaggaaacagacaagtatgcttcaaaagttcagaaggtagttgcatcatttaggttcatatgatgaacatggtcatgacgaggaagaaattttctcacagcccttcttcatcttttctatttcataacggatttgtgtctgcttagatcttttctattctggctcccctcaagattttcctggcattgttcttaagctataaatggcattccagatcagactagtatgataaaaaccatgacatttccttcaagattttgaatgaaagtaatatacttgtggcc

SEQ ID NO: 8579 - DNA, 1867 bp, Glycine max
ttttttttttttttttcaaaaatgtgatgggctatccattcatgacttggacagagtacatcaggataccttttgcacaaagcagcaaactccacgaacatatagttcaacttaattacacaatctcactcgttttctttcataataatgctctccggcacaggcaagttggtcgatttagcctctgaaactgttgaatctgtaaagacaacaccatccatgttacaaaaggaatctttgaccgcaaagggtctccttgttgaagctaccacatcaaagctggttggggagacataaaggtatgtagtagataaaccattaaataattcgtctttcttaggacaatcaataagctctttgtgactagataaatccagaccattggatttatcttggaagctgatatcattctgcaataaataaagggaatcactattaaacttttcccctatctcaaaatttatgtccatatgtccaacttgtttgctcaaacaatcaatttgatcatcatgatgagcattttcctggttattgacacccttaagtggtggcaaatcatgatgagctttctccactacatggaagtgtgatgtattttcaacagcaccaatggatatgtcggaagagcttttgccattctgcacgctattagatgtcttaattgcaacatctaatgattcatgaaaaggatttggatgtggaggttgctggttgttgggttttgtattatcaattgaaacaaaagatctggatggttgcagctttccaagttctgctttgttttggccttctcttggactttcagctccatgttttggcaagccaccaggtacaatagacccacgtggagtgcgcactaagggcttcaccccatcaaaaaaaccaatctttggtgaaggcagtcgaaggcctgaagctttcttggaagctggaggaagaactgctgctccaggtgctgtcctttccttctgactaataatcccactatgccaagcctcttgcctttctaataagcttgaatcactcagaggagtctgaggatgtgtaccttgatctgtatcagtgttcaataaaacctttctgcttgacccactatcaatgctggaccttgaactattacacacacgtttagccatagaagttgttgaggatgactctgatgaagaccagtcactgatagagctagcaggtgaaatactagaagaaagctttgtggcagacatcaagcttgaaagactagaaatctcaggttcagctttatttcttgaagcaattcttgaaggtgttttgacaaccgagcaacacgaggttggcttataacttctttttaagtaactaaaagaagatttaccaatattgtcagataaattgttaccggaagatgtggaagtcactgatctagtcctggttgatactgttggaccaacaggtgatttggatggtagtgttggcttaggcacagaacctcgagaacctccaagaacagatgcttttgccactgaactgactctatcaccaactgtttgttttgccttgtccctttcacttttgacatgtagattgccaagtgaatctctcttggatggaagagtggaacttaaactagacctaactggtgcctttgattgctttaaaatagatgactctctccttgtagccacaggctgtggaatttgtgggaaaataggattattcttctttgtcattttcccaaacccttgcatgccagcaattggattcttagaagcaggtgggaccttcatcttcttgcgagaaaccagtgccaacctttttcgaagagtcatgagtttggaacaatggaacggggggggggcctacatagctgctcgagggggggcccggtccc

SEQ ID NO: 8580 - DNA, 1142 bp, Glycine max
aacatcctaatcgaaaaaaacgagcaagcgataaatcacaacataaaagggttctctctcacgttctctttcacacactaagcgtgaactaatatcgaaattcaattataccctgaccctgtgttagtttcgtgtgttgagaagcagagagaggcagagatgcaaggaagcgcagctgacggtgaagccttggatttcgagcctgaggacgatgacttgatggacgaggacggcgcccccgacgccgacgcttctccgcctcaacctaagctcaaatccgccatcaccgccgccgccgcccccaaaaagaccaagggtcgcggattccggcaggacaccgacgccaaccgcgacactcgcctctccggctccgacttcgactctctcaccaccgagggcggccctggccctcaaagatccattgaaggatggatcattctggtcaccggcgtgcacgaggaagcgcaagaagacgatttgcaaaacgcctttggtgaatatggagagattaagaacctgcatttgaatcttgatcgccgcactggttttgtcaaaggttatgcgttgattgaatatgagcgtgctgaggaagctcgaaatgcaatagagaatttgaatggatctgagcttcttacccaaaccatttatgttgactgggccttcagcagtggacctattaacgagtcagtcagaagaaagaatgctagaccacctcgtgaacggcgttccaggagcccccggaggagatattgacatgtgtagtgagtaaatgtttgtgttgatgtgtgtgaacccgtaagtgagcggcttggtttctattgctatagctgtggaggatttttctgatacttgtgcttccgtcaggcaaaatacatatttgatgctgacaattctcatctaatacatcctttgttgaatggtataaacttttagctagtttattatggtgtatggtatttaacatactattgtttcattgtagtaatgtgttttggacatgctttttcttacatgtaatggtattatgttgaggaacgtaggatcgcctttcgtttgaagcttgtttctgttgcatgttaaagtgtgccttagtgtctcttcctttctttctgttttgttataaatcttttttactttcaatg

SEQ ID NO: 8581 - DNA, 739 bp, Glycine max
aaaaaccaaccattattctattcttgaaactacaaaataacaaagtctcaagtttaaccatgcataattctaatttaccactaaaatgacgctcatctcaaggtcaccagataatgtttgtccagagataacatcatgaacatatacgaccaacagttgtccttgaacataatccaattacgatggcataatgtcctcaaaatggggtattaaaattcagagtactttttacagataaaaaagttcaaaaacagaataacgagttcatccgacatccatggcatcattaccaaaataactcggaattcagaatgtagatccattccatccaaagttggaacccttggtgtcataaaacttcaagtagaatcgcgactttggcacagacaacttgttttcgagaattgaagcaatgccagcactaagtttcttgttcacgtcagggctaagaccaccaatggacaccaattcaccataagctgctggctgctcactcccaccatgagatataggcactgatcctttcaatacaatcatcacataggcctcgggtttgccgatgatgctggcgacggttgaggtggcttcggagagaatggaggaggtgtcgacgccgtctaggttaacgttggtggagaggttgaggcacggcatcgtttcactctgcaactgttgtatgtcaaaggtgaaaggttaaaaaaaaaaatcatcccccttctgtcgtcttctcgcagccgta

SEQ ID NO: 8582 - DNA, 1685 bp, Glycine max
ccacggttgcagtgcagcaattccagtgcttcacagaatcaaattggagaaatataacaaggccatgcattccccctcacagttcacttcttctacgttcacgcaacaagattcaaatttctctgatttcatgctcttcatcacagaccccagaagctgatacacaaactgctgaatcttgcgtcaatttgggtcttgagctcttctccaaaggacgggttaaagatgctttaaccctgtttgaaacagcactttccttgaaccctaatccagtggaggcccaagctgcgtactacaacaaagcttgctgccatgcatacaggggagaaggaaagaaagcagccgattgtctccgcactgctttgagggaatacgatctaaaatttggtacaattctcaatgatcctgacttggcctctttcagagctttgcctgaattcaaagaactacaagaagaggctaggctgggtggggaagatatcggctacagttttcggcgagatctaaaacttattagtgaagtccaagcaccatttcgtggggttaggagattcttttatgtagcatttactgcagccgcaggaatatcattgttttttactgtgcccaggctattgcgtgcaattaatggtggtgatggtgctcctgatctcttggcaactgctgggaatgctgccattaatattggaggtatcgttgttcttgtggcattattcttttgggacaataaaaaagaggaggaacaactcgcacaaatatctcgagacgagacactatcaaggttgcctttgtgcctttcaactaatcgtgtagttgaacttgtgcagctacgggatacagttcgaccagttatattagcaggaaaaaaggaaacagtttctttggctatgcaaagagcagagagatttcaaactgagctccttagacgtggtgttctgttagttcctgttatttggggagaaggtcaggaaacaaaactagagaaaaaaggttttggcctaaagccaaaggctgctgaagctcttccatctattggggaagattttgagaagagagcacagtccataactgcaaaatcaaagttgaaatctgaaattaggttcaaggctgaggttgtatcaccagtggaatgggaacggtggataagagatcagcagaagtctgaaggagtttcacttggtgaagacgtgtacataatacttcgcttagatggacgggttcgaagatcagggaagggtatgcctgattggcagcaaattgtgaaggagctaccaccaaaggaagcatttttaagcaagatagaaagatgagaagtattgttgagaattcagacggttcaaattttaattattattttttttcctgtcccaagtgtctcctggtatctccgtcgttggtaatgtcccacagcaatatttttcttggccattaaactaaacactgggcatccattcctccacgatcactacagactttttttttgggtataatgttttacactgagatttaaacctataacttcatgtatatttcaattcccaccactagggcgaccctaatggttctatcactacagacaattgcaaagtaaatgttacgaaagaatattaatattgataaaatattttgatgacaaaaaaaaattgtacttactccgtcaaaaataaaaatgatgtacttaagcg

SEQ ID NO: 8583 - DNA, 971 bp, Glycine max
ccttggcaactgcactgtacaaactagttgcagagcggggtccatggagttctttgtctagatgggctctagagtcatacttaaaaggtgatattggcaaggcatttatgttgtattcaagaatggctgagatgggctatgaggtcgcacaaagtaatgctgcttggattcttgacaaatatggggaacgtagcatgtgcatgggtgaatctggattttgcactgatgcagaaaggcatcagcgggcacattctctgtggtggcaagcttctgagcagggtaatgaacatgctgctttactcattggagatgcatattactatggtcggggtactgccagggattatgagcgagctgctgaggcttatatgcatgctaaatcacaattgaacgcgcaagccatgttcaatcttggatacatgcatgagcatggccaaggacttccatatgaccttcatctggccaagcgttactatgatgaagctctagagcatgattctgcagccaagttgccggtcacgctggctctttcaagcctgtgggttcgtaagaactatgctgacagtttcatggtacaggtaattgattcattgcctgaactgtatcctaaattagaagcttgggtggagaatgtgcttttggaggagggaaatgctacaattctgaccctctttgtatgcctcttaactgtgctgtatctacgtgagaggcaacgaaggcaagctgccgttgcagctggagaggtggctcagccaaatcgcccaaatgagcttggtgcacccatgtagctataggccaaattgtaccataggaacttatagctaacagtggaaataagtgcatttgtagatattcatttgtaaggtaggaacacgactttcaaaccagttcattgaacctccaaaatgagagcaagttgtaagattttgtcttttgttcgaaatttatgaagaaatttcactaaccaaaaa

SEQ ID NO: 8584 - DNA, 1245 bp, Glycine max
aatcagctacgtaggccccccccccaaaccaaatcagagaacaaaggatgatgtggaagagaagaagaagccttcagcacttgaagttgaaaccttgctgatcctcatcatgggaaccatttttcctcctcactctctctctccactcctcaacatcaaaccttcaccctcaagaattctcttggctccctctccccaacccaagtcaaattctctcttttgctccaaacccattgtttcaagtctcagaaagaaccaaacttcatctcccaaaccttcatcgggcacaagctggttggctcatgctcaacagggcctagcagctttggctatctccttggcactcaactttagcccagttttgtttaatggcaatgcattggcatctgagtttgatgtgcttaatgagggtccacccaaagattcttatgtgtttgatgatgcaggagtgcttagtagggtgaccaggtctgatttaaagcagttgttgtctgatttggaatcaaggaagaacttccgcatcaattttataactgttagaaaactcacgagcaaagctgatgcatttgagtatgctgaccaagtcttggagcgttggtacccttctgtagaagaagggaacaacaagggcattgtggtgcttgtcacgagtcagaaagaaggagcagtcactggtggcccggcttttgtcgaagctgtgggggaaaagatccttgatgctaccgtctcagagaacctcccagtattggctacggatgagaagtacaatgaagctatttttagcactgctaaacggctagcggctgccatagatgggcttccggatcctggtgggccaacagttaaagacaacaaacgtgagtctaacttcaaaaccaaggaagagacagaagaaaagcgtggacaattcactcttgtagttggaggtttgttagtcattgcatttgttgttcctatggcacagtactatgcctatgtatccaaaaaataagataatataaatagatctgtttttcaaattctcactgttcaaattcagatgtataatgtgcagttgtaaccatgctcatgttacaattgagtttgagaaagctgaagaagaataagatgacagtttttgcttgtaaatgctattccaaagtatatgtatttgaccatttttatatgctggttggcgatcttaaaaaagaaaaaaaaaaaaaaaaatccttgcccctctttcatgttcctcgtgcctaagtgtcc

SEQ ID NO: 8585 - DNA, 841 bp, Glycine max
gcggcgggtgcacttcctctctttctgcttccttcctttatcctctctctctatctctctctcaaaagcttttatttgtttccgtcgtacgttgtatgcttgggagcacaacacaatgaaagaaaacgtaggaaaccctctgcacctaaagtctgtgaaccatatctctctcatctgtacctccgtgaaagaatctatcaacttctaccagaaccttctcggattttttcccatcaggaggccgggatcatttgattttgacggggcatggctattcggatacggaattggaattcacttgctgcaagccgaggaccccgacaacgttccaagaaagacgaaaattaatccaaaagataaccatatatcattccagtgtgaaagcatgggggcagtggagaagaagcttggggagatggagattgaatacgtgcatgcaacggtagaggaaggagggattaaagtggatcagttgttttttcatgacccagatgggttcatgattgagatatgcaattgtgatagccttcccgtgatccccttagcagcgagtggcaataacaatggcatggtcagatcatgctccagactcaaccttcaaattcttcaacagatacaccaatttctcaaccaatagctagccactagtcagatcatgatgatgatcatttcctcctttttcatgctgtttagattattccttattttatcattctgtctagttcctttgcagtaataaattattccatatatattcgcttcttattaaaataaaaaaaagagaagtatggtttaatttgtgccagtggtttttccgaaatgagatttgctttcttgcatc

SEQ ID NO: 8586 - DNA, 1736 bp, Glycine max
agaattttttttttttttttttactgtaaaatttccaaatatctagacctctcaaagatttgtatagtacataacatctcaaaattcataacaatattccacaaaagaaatcaccagatcagttgtcaatatttatcaaaaaccctaattaaatatactcatccaaatattctactgataaagccgcccttggcttttctatccttcttcatcctgttttcaataggtgggaattcaatcatgttataagccagatccagcacaataggattacgggaaattgcctggaaagccggggggaagcctgcaatgcgtggtgtacacttcacatttgaatcacccacagcagattcataaacatctagtttctcaagaaggaacttctccaaccgctcagttccagtcaatgatatattggagaccctttcagatagattttcttgagtctttttctcctccatgatccccaatgcatgctctatacaactgttagatcggcactcattgcacaaatcctccaactctttcatcatagtcttattatcaccatccaacatttggaacttttttaaggcatcatctgccaaattgcgagcacgacagtacaatgcatatgcttcagccctctttccagccacactgtatgactttgcaacataaaagcacctttgggctcgaaaagccaaacttttgcatgaacacacttcagcaaagataacttcttctggctttttatcccttccagaactgactaaatcagatagatcacctgtattctgcagcaagagatcatataagcgaacaagctcttcaggtttggtgagtttttcatttttatcatcatgacgctttgcaagtttgctttttgcaaccttaaccaacaagaggttccgatcaatggttctttctcctaggacagcactgacagccttatcaagaccattcaaatcatctttcacgctttctgtacttcctgtagtggccaaatcagcccgaatatagcctctggcttcatgatatgcagaaaagattttgtcaaaaataacaagtcttttgtctgctggaattgagtctgccaagggaccatgtatatctttctccagctcctgagctttcaggatggaaacccttgttttggcatttgatattggaaatctgtggccaagccaaaggaattctgtcatggaagcagcttgttgagatcttgcctcagccatggcagcctctaatttagctttaaaaaggtctaatgcgggaccttccacatcactgatttgcaaaagttcagaggcctgtaaatctgactggccaattttgtgaaggcagtaccggatactaggttctagttcctcaactcgctcacgacacaaaacttggttatccagatctccatatttccccaattcctcatatacagccctagcacttttgaagttctttaaagccacgtcccaattctgatcttgctcaaacaacaagcgcgcgggcctatggagctcataagcctcggcggctaaagatgttctagaatctgctttgaccgcacacaatagtgaaaacaaagtagcccattttactgctttccgcaacctaccaatcaaatatatgcgttgacgtgcatttgggccatttggaagctgccttttctccatggcatgactccaagctctctctgctgtatagagaattacatgaagaaaccttacttcagagacagtagactcagttctcgagcc

SEQ ID NO: 8587 - DNA, 1774 bp, Glycine max
ataaacaaattagattaaaatgttgcttccggtacttaagaaaaaattaaataactgggcctcccaaccaggagaccagattatacaagaggccaatttgtcccctcatctattgtcaaaaaccatgtttcagagtggtaataactcagaaatgatgcattctacacaagcaagtaattacaaagaacaagcatatgatttcattataaaatctattgcctagaaagaatgaggaataggggtgcattagactcagcttccccttcctagttctttctccaaaagagtactctaaaaataatctagtatttggtttttcactttcctgttgcatattggttggttaactgtgttcgtccaatatgagataaccttgatgatgaaattagtggtgtttcttcatcaattttcatatcagaagcagtaccattacctccactgcttccctcattgtcaccaatgttatctggcacatatatatcggatgacttcttctcgaatttccagtcctttgtgatccgatccggtatactttcaacaggcaattgagaggcacggacatccttaacctttatgtaattgtacatcacaactccacacaatgcaatagcatagccaactatattcaacccagttattgtagattctgggaatataacagttgaaagagctatcaatatccagtctttaagcacaccagcgacccggatggttacagcaccggttctaccaatgactaagaaaatggagaaattcaaggctagagcacatatagcgttggacaagaagatccaaaaattaaactgaatctgcgaaacttccatcacaggcttctctagtaggtaccaaggcacaaagagaaacacaaaactgcagggagctatgtaatataagcttgtaataggatttagagtcaacccctttttctgcagaagaacttgtgttaagaccagtcttaaagcttctgcaaatatgcctgtgacctggtaaactgtaccaactatattaaaatgaatttccccatatgaggaaatgacaaccccaacactgaccagcaacatgttcaagaacacatcacaccttgctttgtcaataccgcacaaaacagccataatgaaagttgccaccggcatcagagctttgagcatctggataaaagccacggagatgtgcaagtaggctgtgttaccaaaccaaagactagatgcaaagaaagcacttattggtaccacgcaagttgcatatatttcaaatgtcattttgacaggagtcacaatcttaaagacccgaacaaggaaaaatgcgactgccccagaaaaggccatgtgaatcatcgtgagcgttatgggaaggggaaagttgaagtattttggcgacagaacccacttattgtacaaaatgacgccggaagagagcaggatgtagatgaacaagtagacataagtgaggaaaagcgttttgttgatcatcattttttttgtttttgttttgggggtttggacaaaagggggcaaagaaagaaagaaaaggggttcagcagtgagctaaagacatgttgaaaaatgcaacaacttggaatgaaaatgaaacccaaatgttattatcaatcaataatcaataataatgggtttagtgaagggtgcggatcggatctgcgaggaggggtaccctcgaagagaagagaagagaagtccggacgcggggtcggcccggggggccccccgtggagtggaatatataaggaggagaagagaagatagatggaattgcgaat

SEQ ID NO: 8588 - DNA, 867 bp, Glycine max
  misc_feature (722)..(724): n is a, c, g, or t
  misc_feature (797)..(799): n is a, c, g, or t
  misc_feature (818)..(818): n is a, c, g, or t
  misc_feature (842)..(843): n is a, c, g, or t
  misc_feature (845)..(845): n is a, c, g, or t
cgaacaaaaagtagctatttcattatatcatgaagttaaatttttgtttgttgcttttttttttttttttttttttttttttttttggattcagtaacttaagaaataattaaataactgggcctcccaaccagcagacctggttatacaagagaccaatttgtcccctcatctactggcaaaaaccatgtttcacagtggtaacgcagaaatgatgcattctacacaggcaattacaaagagcaagcatatgatttcattataaaacctatggcctaaaaagaatgaggaaataggggtgcatttgactcagcttccccttcccagttctttctccaaaagggtactctaaaaataatcttgtatttgggttttcactttcctgttgcatattggttggttaactgcgttcgtccaatatgagataaccttgatgatgaaattaggggcgtttcttcatcaattttcatatcagaagcagtaccattagctccactgcttccctcatcgtcaccaatggtatctggcacataaatatccgatgacttcttctcgaatttccagtccttcgtgatcctatccggtatactttcaacaggcaattgagaggcacggacatccttaacctttatgtaattggacatcacaactccacacaatgcaatagcatagccaattatattcaacccggttattgtagattctgggaatataacagttgnnngagctatcaatatccagtctttaagcacaccggcgacccggatggttacagcaccggttctaccaatgactannnaaatggagaaatttaaggntagagcacatatagcggtggacannangatccaaaattaaactgaatct

SEQ ID NO: 8589 - DNA, 1869 bp, Glycine max
tttttttttttttttttagtagttaatgaattgttttaatcactatgatgtacatgttgaagatagcaacaataaaaggtaaacatgggtaaagacaagcacaaccgttcaaatgcaagggtaactaattagttatatatgtatagaagatagaatctctacaaattttaattaacatcacagcattccaacatcatttttctttaactttatttcgtggaagcatcagtcaacccaagctccttgcgtagctcttcatctggctgcaagctatctggaatggcaccaaagattcttcttgatacttcaaacccagaagctacatgatgcacatatgctgatgcttcatctactttctcttgcaaatttaaggaggcagccagaaagtttgaagttgttcttgacaattttctctctaacggcttgtctaagtcagctgccttaagaaaccgttttgtggcggcctcccaagataggtcatgtctctgagcatcagtaggctgggcaggttgttcagccagtgccttgagtgtgagtttaacaaatccgtcatcgtcgtcgtacgtccaacaatttgggaactgcttgaaaaagtcatttgagggatggttggcacaaacaacaattttgcccattgctaaagcttctgctgttgttgtgcagaccacatctgttgtgcttggattaagaaacaatttgtaatcatgaaatagagcatcagcatgatcacgagctgggtggactctaactgctagttccaacttttctgcagctttttgaacttcatctgagtcctctccactgccaaataaatcaacctcaagagcagataattccttttcatgatctttaagaagttggagcagttccttgtagcctttgctccatatcatcttcccaataaagtaggcacctttggtaaaggcatgttctcccttctgtcgtcttctcgcagccgtattgccaatctcaaggaatttcggattaactccatgaacattacagatgatggagccagtgtaatcctgggtggcggcagataatctaattaccttgtgacaatatatactaacaacccagttgtttaaatatttcagcaaaaatgcttgcatgactccattcttctctctcttcacatactccaaataattcgtatgaattatccctataactagtctgaatttagtcttccatcttttcccatggtgataccatgtcaagtgctcgggctcctctagaacagcaatatctgcaactttgtcagggataatctctgaaatatccccaacagcaagaatgctccttttatctctagaaaactttcctggataaaactgtatgctgaaaccagatgtaaatccaactctctcctctagccactggcagatatacttctcatgctctgagggtgaagcaaatgtaatgttgttgggatatactagtctttgatctttcagagataaccaagggatcaccaaagtgacatctctttccccacttttggcgagatacgcggcacgaaacaaagggttcacagcggttcctgtcaaccatggaaggctagcagtagtaaaaattgcaatatgctctttcttgtccatctctgggggttcaaatgagaaatcccatcatcatagattcagaactccattgcagatgaaaatcaccagcaaaatactgctttagaggataactatgtgatcacttcaacttgaaggggtcaagtaaaaggggagaagtaaagaatggtaaggaagggatcctagagagagagagacagagagaccaacaagtggcgggcgcggggcggcccgggagtgagaaacgaagggaattaaggagagagaaatagaatataatctctattct

SEQ ID NO: 8590 - DNA, 1825 bp, Glycine max
gtttgtccgtgtacgcaactttttactctcaatttattttcagctacgtaggcccccccccccccgagaaaaagagaaggtgagagaattgttgctctaataaagtttcgttaaactgcctgtaattctcttcctctttcaatcccctttctcaacacaatcaaaatttcttctggtttcttcgaatccgagatccgcttccaatctcgttaatgggtccattttattttggaacattttaatgggttctttcgcattgcaaacaatttagtcctcaaaagggtgttgtttcagatcctaggtttttctacatttcttcacatcccaacaatttattaaccagcataagaatggatgatgcgatgggtcctgacttgatcagtgatcttcctcaaagcattatagagagcattctggtacagcttccaattagagatgctgtgagaactagcatcttgtctagtaaatggaggtataaatgggcttcaattactcgacttgtgtttgatgacaaatgtgtgccctttagtaatgatagggaggttgttgagaagagtgttgtcaagttcatcaccagggtgttgtttcttcgccaagggccaattcataagttccaaatcacgaattcgaagttgcagagttgtcctgaaattgatcagtggattcttttcctttcgaggaatgatatcaaggagttggttatggaattgggagaaggggagttttttagaataccttcaagccttttcaattgtgggaagttgacccggttggacctatcgcggtgcgagttcgatccgccacatagttttaaggggtttgtgtgcttaaggagcctcaacctccatcaagttttgatatcccctgatgcaattgagagcctcatttctagatgtcctctcttggagagtttgtcactttcttactttgataatttggctcttactatctgtgccccgaatcttaagtacttgtatcttgaaggtgaattcaaggatatatgtcttgaagataccccacttttggttgaaataaccattgctatgtatatgactgatgacattgctgagcactttgagcaaatctcaaactgcaattttgtcaagtttcttggtggcgtgcctaatcttgagaagcttgttggacttatctacttcacaaagtatttgagcataggtattgactttgtgcatcctccaatgatgtacaacaatttggagactattgaattgtatcaagtaaattttgaggatatggtagagatacttgtcatccttcgcttgattacaagctctcccaatctaaaagaactacaaatttctggttcttcaaacataccagtttctgtagataccccagacttggatttttgggaaaaagaatgcctttcagattctacacttaacaagcttaaaaccgtgaagttgtcagaaatgggtggttggccacatgagatagaattcatcaaatatttgcttggccgttctcctgttctcgagacattgagtatcattccttgtgtatttgatatggagaataatttgaaaatgttgattgaattggtgaaatgtcgaagagcttctactagagcagaagttattttcacccacgagtgaaattgtggactgtattataaaatgcattattttataccatttccaatgctatttctccctggtttatgcatgactttcatttagaatacaaatatcattattaccaatgagaaaaaaaaaaaaaaaaaaaaaaaaaaaaaaaaaaaaaaaaaaaaaaaaaaaaaaaaaaaaaaaaaaaaaaaaaaaaaaaaaaaaaaaaaaaaaaaaaa

SEQ ID NO: 8591 - DNA, 938 bp, Glycine max
  misc_feature (2)..(2): n is a, c, g, or t
  misc_feature (15)..(15): n is a, c, g, or t
  misc_feature (17)..(17): n is a, c, g, or t
  misc_feature (19)..(19): n is a, c, g, or t
  misc_feature (54)..(54): n is a, c, g, or t
  misc_feature (86)..(86): n is a, c, g, or t
  misc_feature (91)..(91): n is a, c, g, or t
  misc_feature (108)..(108): n is a, c, g, or t
  misc_feature (119)..(119): n is a, c, g, or t
  misc_feature (131)..(131): n is a, c, g, or t
  misc_feature (918)..(918): n is a, c, g, or t
  misc_feature (938)..(938): n is a, c, g, or t
gnctatggttaaaangngngattaacaaaaatttaacgggatttaacaaatatnaaggtaacaattgccatttgccattcaggtgngcaantgtgggaaggcaatcgngcggccttttngttataaccccnagtgggaaaggggatgtgctgcaaggcgattaagttggtaacgccaggttttcccagtcacgacgttgtaaaacgacggccagtgaattgtaatacgaagcacttataggggggggtgggggccccgccccccttcgagttttttttttttttttttgaaaaggaaaaagattttgtcttaaataagcttttgtcttaaatatgctgttgtcttaaatgcgatgaaatcatgctccttcctctattatatttcacgataataaaaaataaaaatacttctcccaattgggcttcctgtttgatggtaaatatagaaaagccatatcaactctacaattttgtaatcctaagggatggaaagataaaaacaaatcccgttgagcattaagctaaggaatttgagctatttccaccaaaattttgtgaagagattgtggcttagaaaagaatggacagtggtcactgcctttgatcttgaaaactccttcaggtggattttccctcacaagcttctcttggacatctggtgaaagcgcacgatcatccaatgtttgaatgtaaaaccggcgaccagtaccatatttgtcagcagatagagacagtttctccattattggaccaagagggctatgtctcatggaaaccatggctaaagcaacatcctttgccggggattggttaaaatataaccctttcatctgctctttctcaaacataaatcctgttgggggctttttcctcgtgccgaattcctgcagcccgggggatcccactagttctagagcgnccacccacggccgtggagtn

SEQ ID NO: 8592 - DNA, 1023 bp, Glycine max
  misc_feature (214)..(214): n is a, c, g, or t
  misc_feature (957)..(961): n is a, c, g, or t
gccgaaaaccaagaatctcgggaaggtctatctgagtctgctgcaacccctgaacgttctccggctacggttgatgatgatgctctagaggccggtgagattaattctcctgagctttcaagtgatgataagaatgatgagggtgactcggtagaggatgctgctgatgcttccgacccggggatggccgccattgcgcccgggtcagccgagnagcgatcaggtggccgagcctacacctgtggcaagtgagggtgctactttgacaagcagtgttgtagagagtagctcctctaaagtgaacttacctgttccaaggcaagggacccccaatgcccctgctgaaacagaagagacaaagcaggcatcacctattggtagtacttcaacgactataattttatcagagcgagcacgggaaagggcccaaatgagacaggctgggttggtttcttctacccttagaggtcgtggaagaggcggtgctccccgtggtcgagttggtcgagttaggggagtagtacgccgaccacctccaccacctggcagtgatcaatgaacaacgagttcaccgtctgtgattgatggttaatgaaatgatttgacttggtattgtaaacttctcccttcgtctgaacgatggcattgtagaccagttagtaggcgtaaattggcgaccagttttcgtcaatgtaaatacaattttgcttttcactcatttctccccttacctatctaattttgcctcaattagcttggttggatttacatcatgttagatatgcgggaattgtggttttatttagcattcatttcccaaggggtttttatgttggaaaaaaattgaattacttttcactcatttcatttcatagaatcatgagtgggcctggaatctgttcttcggaaggtgttatttgaattcgttcctggtattagatataaaagtattcacannnnngggtaaaagataatttaagtcccgttattacacattagaaggtctacacgtttacgttatga

SEQ ID NO: 8593 - DNA, 1337 bp, Glycine max
attattggggcgatatattttcttcctatataatctcagctacgtaggccccccccaaaaagaagattaagataaggcaatgaatctgatgcaggcggttcgctacgacgcctacgggggaggtcctgccggcctcaagcacgttgaagttgccgttcccagtccaaaggcaaatgaggttttaatcaaactggaagcagttagcattaaccctattgattggaagattcagaagggtcttctccgtcctttatttctccccagaacctttccccacataccttgcactgatgtggctggagaaatagttgagatcggaactcaagtcaaagatttcaaagttggcgaccaagtccttgctaaactcactcatcaatatggaggtgggtttgccgagtttgctgtggctagtgagagcttaacagcagccagaccatctgaggtctcagccgctgaagctgcagcattgccaatcgccgggcttacagctcgtgatgccctcactcaaattgcaggagtcaagcttgatgggactggccagctcaagaacattttagtaactgctgcttcaggtggtgtaggtcactatgctgttcaactagcaaaactaggcaacacccatgtcacagccacttgtggggctcgcaacattgactttgttaagggcttaggtgccgatgaggttcttgactacaggactccagagggggctgcactgaagagtccatctggtaggaaatacgatgcagtgataaattgtacaactggaatatcttggtcaacttttgatcctaatttgactgaaaaagcggtggtagttgatttaacacctaatgcaagttcattgtggactgctgccatgaagaaaattactttttccaagaagcagctggtgccattttttgtaaatgtccagcgtgagggcctggaatatctacttcaattagtgaaggacgggaaactgaagtctgttattgactccaagtttcctttgagcaaagctgaagatgcttgggctaagagcattgatggccatgctaccggaaaaatcattgtggagccataggtacagtttgcttggaattgttgtatttctagtttctacatatctggacaaggtttgtgtaaagctcatatgaaaatgaataactagggatatcgtatgccgtaaggattttaagttaatgtgttttcatttgatatttcgtactggtttgtatatgacaagatgctttatcaggcaactttttctcgtgtcctaaaaaaaaaaaaaaaaaaaaaaaaacgacttaagacgacgaatccacatgtgtataaatgagcaatacgcattcccc

SEQ ID NO: 8594 - DNA, 1475 bp, Glycine max
tttttttaaaagcgcttcaaaacaacgtagtcttatactcaaatgaacgtgaagaggttacacaagacattacaagtagaatgtggggactgattcaactaggagcctaacaacaagcaggacggcaaaattatgtttttgggttgtcataacaattttagagctaaggtctaggctcaagaaagtaaccaacgggataattatggtacatgtcctacttctacatcgaaatacataaataatcaatcatcattttcaagccaataatctaaacaacaaaactgaaaaagaaaaagagaaaaaaaaaaaaacctaagagggacacatggttttctaacaacttatcttgccaaaatgtatcatcaaagagaagcttccttctttccccaagaatttcagtcactggctttttggtttctcaatcttgacgtaaggtacacccattaaatgaacaacttttggagaccacccacgctgttgagcccggcaaaacatcaagaatgtgttggcaaagtaggaattgaaacccatgaacacatgccacaaggcatgaccctgagggttaataggccaacgggaaatctccttgcagaaaacacgatcacagaacccaaacaaactgcctaatacaaaagtacctaaaaatagctttgcaagccgcttggcagaaacatcttgtgtgtaaatgtaatacttgtacattctcggaacgcagagaagaatgagaatgatataatgcactttgaagccaataccaaaatgaaacactgaatgggcaactgcaaaaagagcaccatacacgaagaggaagatgggcattgtactgcggtaatgccaatctggagagtagaggatgtacatgtacagcagcacctcccataccataggagtttcatcgctttgctgttgcacatgttgcagcgtagcatggtacaacatgcttccaatggcaagtgtcatatttgaaacatgaagaacactaaatcttttctcaaaccgttgtcttaatgcatttataagaccaatcagagccaaaagtattgttggaatgttggatattgtattaaaaaattcagcaatgtaagacgaataagcataatttatttcacaacactctttggtggacgtgactggaccccagaagctagatatagattctgccattctcctctacagcctgatgattggtttatctatatttcggagctgcagaattaaaaaaatcctgaagccacgaacagaaaagaggcaatgaccgcgaaagaaacacagtaaggattttgataatgcgtgtgccgtcaaatctccaccaatcacaaatccatacaacccatcggaaaggaacgacaccaacccaaaccttaccctatggcgtgcaaatgcaatgctctacggattttgatagtttagttattttctctgccatgccgtatttaatagttagtatcatatggggggggggcctacgtagctga

SEQ ID NO: 8595 - DNA, 1272 bp, Glycine max
tacggctgcgagaagacaaaagaaagttgaagaatatgagcagcagtgcagggaagttggtgtgtgtcaccggtgctgccggttatattgcttcatggattgtcaagttcctacttgaacgtggttacactgtcagggccactgttcgaaacccaaatgatcacacgaaggtagaacatttgctaaaacttgaaggtgcaaaggagagactgcacctttttaaggcagatcttttgggtgaaaattcttttgactccattgttgagggctgtgatggcgtctttcatactgcttctccttttattatcaacgtcaaagacccacaggctgacctacttgacccagcagtgaagggaactcttaacgttcttaaatcatgtgtaaaatcgccatctgtgaaacgagtcatcttaacatcttctgtggctgcagttgcatataataaaaggcctaaaagtcctgaagttgtagttgatgaaacctggtggtctgatccagattactgtagggaattaaagctgtggtatttactttcaaagactttggctgaagatgctgcctggaaatttgccaaagaaaacgaccttgacttggttgttgttaacccagcaatggttgtagggcctcttttgcaagcagagcttaacactagtgctgctattattttaaacctaataaatggttcagaaactttttcaaatgatacatatggatggatcaatgtgaaagatgttgcaaacgcccatattcaggcatatgagattgcttcagctagtggaagatattgtttagttgagagagtggcacactactctgaactcgccaggattttacgtgatcagtacccgacatatcaaattccagaaaagtctgcagacgataagccttatgtaccaacatttcaggtttccaaagaaaaggcaaagaccttggggattgaatttattcctttggaagtgagtcttagagagacagtggaaactttgaaagaaaagaactttgccaacttttagtctctgatatctctgcttgatcaggagtgaacacgttgagaatctcaacggtgtttcgtttgtggttctggttttagaatctcattgcttgaaaataaactattgtactgaaatgtcaagcttgtgtgttgtaataaaacaagattaattgttggttttatttcggtttgtactcatgaaggaaaccaacgtgtggtataaaaagataataattaagtatcaggctatttctagtccaaaaaaaaaaaaaaaaagaaat

SEQ ID NO: 8596 - DNA, 1751 bp, Glycine max
gaagtgtccctcaaaaccagcatagttatttttgttcttttggggacattagaggattagcttcgtagtttggtccaagcggttgcttttggtttttcttgcacttcacatgtgtttttttttgtaacggttttgggtgtgagagtgaagagcacacttcaactattgagaaccgttgacctccatggctgtgacatcacctcttgtcgtagcaggttctcaacttcggtgtcacaattttagaagaaccagacactgggctcttacactgagttgggaaaaacagcagctgaagagagcacagaagtgtggtggggatgagaatccatggaagccagtgaagatagtgatgcgtgtggttgatcatcatccaagggatggtgatgtctcctatggactgcacaaggatttggtctcccttccaaagccattatccatatctgatattgtggctgcttctgatgatcatgctaaagggataccgggatcatacagtgaggatgctgcactcaaagcttaccctaattgtgaaacagtttcatgcaatgactttgaagaagcttttaaggctgttgagatatggtgggctgacaaagttatccttccaatagaaaatacatctgggggaagcattcatcggaactatgatttacttctttgccataggcttcacattgttggtgaggtgcaattggctactaacctcgcccttctcgctctgcctggcgtcagaactgagtacctaaaacgggttctaagtcattcgcaggcatttgaattgagtgatgatttcctgactaaattaggtgttgccagagagaacgttgatgacacagctggtgctgctcagattatagcttcaaatggtctgtatgatgccggtgcgattgctagcattcgagctgcagaaatctatgggcttaatgtactcgcagaacgaatccaagatgattctgaaatcatcagtcgttatctcgtgcttgcaagggatccaataattccaaaggctgataagccctttaagacaagtattgtgtttacgctggatgaaggacctggagtactgtttaaggctttggcagtatttgcattgagggacataaatttaaacaagattgaaagccgaccacaaagaaatcggccattaagagttgttgatgactctaacactggaactgccaagtatttcgattaccttttctatattgattttgatgcgtctatgactgagccccgagcacaaactgctttaggacatctgcaggaattcgccacatttcttcgggtgctgggctgctatcccatagatacaaccatatagtctatagatagctatctgctttttattggtcaattttcaatgaatgtcattatattcaagcctgaaactttgaagagaatttgcagctaccttcatgtccaaataaaacaagagctgtcagatggtcaaaaatgtatttacattacataatagttagcctttattcattttgttagtcagttttatagattgacacgtgtgattatactaactctcttatacacatatataagagaagcagagacaagtattgtaatttttcattcaatcaatattcagaactttctcctttcttcaaaaaaaaaaaaaaaaaaaaaaaaaaaaatacatgttgcagggagctgttacccaccaatattttgatggacataatggaacaatttgagtctgtgacttgcaatggattactgcagggagagggttagttcac

SEQ ID NO: 8597 - DNA, 2198 bp, Glycine max
  misc_feature (6)..(6): n is a, c, g, or t
  misc_feature (35)..(35): n is a, c, g, or t
  misc_feature (63)..(63): n is a, c, g, or t
catcanatagctccgggatcaatgtattagcttcncctataggtgaacaggttggctataagngtagtgctttcattggaagctgtaagcatcaagtatggaaggctatcagagcatcatctgctgctccttattatcttgatgatttctcggatgatgtcaaccgctggcaagatggtgcaatagtggctaacaatcctacaatttttgccataagagaagcacaacttttgtggcctgatacaaaaattgactgtctggtttcagtaggatgtggttctgttcgaactagggtacgaaaaggaggttggcggtatctggacacggggcaggtgttgattgagagttcatgctctgttgatcgggtggaggaagctttaagtacattgctacccatgcttcctgagatacaatattttcgtttcaatccagttgatgaacgctgtgatatggaacttgatgagacagatccaactaactggctaaagttggaatctgcgattgaagaatatatacaaaagaatcatcacgcatttgaaaatgtgtgtgatagattgcttcttcctttccagcatgaggagaagtggtcagaaaatctgagatctaaattacccaagacaaaggaatcacttgagggtgctgatggccccaccttagggtggaggcgtaatgtactacttgttgaagcttcacataatccagattctggaagagtgatccaccatgcccgggaacttgagtcattttgtgctcgtaatggcatacgtttatccctaatgcagggtttgtctgggattgtaaaaacagtgccatcaacaacattcccaactccatttcaatcacctctgtttacaggaagcttcccttcgagtccccgcatgtttagtcctgatcttggtcagaggattggacgaattgatctggtcccacctttaagtttagatggtcaattagggaaaacaattgcatcacctccaatgtctcctcgaggacttagacagctctctttgcccgtcaaatcattgcatgagaaattgcagaattcaccgcaagtgggtgttatacatttggctcttcaaaataactcagatggcttaattgtgagttggcacaatgatgtatttgttgtggctgaacctggagaactcgctgagaaatttctgcaaaatgttaaattcagtttgttgtcaacaatgaggagccatcgcagaaggggcgcatctctcctggccaatatttctactatttctgatttagttgcctttaaaccttatttccaaattggaggcattgtccaccgttatctaggccgtcaaacccttgttatggaagatgatcaagaaattgcttcatatatgtttcgtaggactgtcccttctatgcacttatcccctgaggatgtacgatggatggttggagcttggagagacaggatcataatatgcacagggacatatggacctactcatgctcttatcaaggcctttctggactctggtgccaaagctattgtttgttcttcaagtgaacctccagagtctctgtcgaccactgttgatggttacatagagttgaatgtgatggaaaatgggaagtttgaaattggggaagatgaagcagatgatgagaatatacccgccagtccagtaagcgactgggaagatagtgacgctgagagaaatgtggaccacactttttctttttgggacgatgatgaagaggaactgtcacattttgtttgtcaattatatgattcattattcagggaaggtgctagtatcaatgttgctttgcaacatgctcttgcctcatatcgaagaatgaggtatgtgtgccatctccccggcgtacaataattttgttcacttaatctttcccaataaaaaaacccgaaaataaaggatgagagggggggaaagatgagtctgtgtgagagaacatgttcttataaaattatacggtcgataaccaattttgaggcttataaagatgtgcatttatagttgtttccggcgctccttactattttattttgttccttgtacttgttcagttgtacaatactgtgatgacattcggaggattagggcttcggagtatctgtattatagtcgtagattgccatacttttttttttttttggcgaatcaggttattctaagactcagatttataaaatcatttactttccgatgtag

SEQ ID NO: 8598 - DNA, 1747 bp, Glycine max
gaactagtctcgagttttttttttttttttttgaaaatgcaatgataccaaaattgatatataagaaacatgaaaaagtcgacttgtttgtaccagccatagatacagttagtgttcatcagaatcatcacgacttgcttgtactcgctcaagcagttccatggacgcatgcatggctatacaaactggtaaacaagagttcagctgtatatacacatgcgtacttggtttccagggacatgctctcaagtctcaatgccaatttggtttgtggaacaagaaaatatgcaaagggataaacttgtatgagcaaaaatgctttcgcagctacagagatgtgaacactgctatacattagtatttgcaaaatcaaaagattactgctgatatacaatcatgacaaacatctatctatctcgctgatcacatgaatgtgagttcttggaaaaaacagacgcaagaagggaactgaagatgacgacataagcttaggtttgactctatcaacagctgtcctaattgcagatgaagatggtacatcaaaccactgaaggaaccaagaaagaagtattgaacgtttatcttgggattctccatcaggccattttcccaatttcaaatagttatgaaaatcatccttcaattcctgggaacaatttaggagctcctctacctgcttccgaagtgaaccaacaaatgatgattgcacaattcctccttttggagcggataattttccagtcatcaatgcctcaatatatgttagagcaagcttaaaaccagatatagagagtgagtcaccaaaaacaatggcaccgttagtaacttgttcagccatcgattcaacagttgtgtataatgacaaatatacctgtaacagagctggtctatccttggtcacacactcaaataatacttgcaagcagaattccttgaaatcaacatcagatctattataccaagaggggtcacagcagagttgtgcaaaagcaatcaaactaggatcagatgagaaggtaccaaccaactgatcaactgtgattgaaccagatccactacaaatgtccgtgattgtatcagatgctttcaaacttgtcaggccaaacaccttgtgcattgcccgtgacagcagtgactggcacccaatgggatcatcaacatatgaacaagctccaacctttcttttgatgaaaagaataccagaattaaatggattattcttgtctccaaaattccaccaaggtttatcttctggggtaaagtctattacttgaggccagtagcgaggcccacaaacacgtattcttttcaaaattgatcgttctggcagaaggcaaggggtgacctcgcaaaagctggattctgcataatgctcagtttctctgactgtgacctcaagaggagcataaacaggcagacccgtgtcaacatcaactgtctgaatccatcgcgcctctgttgcaaggacatagagatggcgaaatgcctgaaggtggcatctgttatcatttggaccagtcggcaagcgtggatatagagtaattagcaaagcagcaatggaatggttgtttgttgaaaatgttctcattccaccaccaagaaacaagaaaccagtagctaagcttacctaagacagcaggtttataaaacaaaaataacggagactgaagaaggctaattaccaaactcatgtgaaaaaaataagggggggggccctacgtacctgactcgaggggtgggccgaaac

SEQ ID NO: 8599 - DNA, 1931 bp, Glycine max
atctggtatcagatctgtgtcattcatttcttcttctagccatggacgagaagctcatacagcgcttagaatctgcggtgtcgcgcttggagtcgctatccgccggattccacccctccgccacacaatccggcggcgccgacgctcccgatgcggcgctcgatccctccatcgtcgccttcgccgatctgatcgaccagtacgtcggtagggtttccggcgctgccgaggttatcggtggtcaagtcttggatgtcaccaaactggtgcaggaagctttcaatgttcagaaagagcttctgattaagctcagacagactcagaagcctaaccttgctgggttgtctgaatttctgaaaccattgaatgaagtgatcacaaaagctaccaaattgacagaaggaaggagatctgatttttttaatcacttaaaggctgctgctgatagtctctcggctttagcatggattgcatatacagggaaggattgtggtatgagcatgccaattgcgcatgtggaagaaagttggcaaatggctgagttttacagcaacaaggtgcttgtagagtacagaaacaaagatccaaatcatgttgagtgggccaaagctcttaaagagttgtatctccctggattgagagattatgtcaagagctttcatcctttaggccctgtttggagtccaacaggaaaaataattgctccatcaaaagcttctgctcctgctgcccctccccctccacctgcttctctctttagttctgaatcatctcaggcttcatcttctaagcctaaagaggggatgtctgctgtttttcaacaaatcagttcaggaaacgtcacttcaggtttgaaaaaggttacgaatgatatgaagactaagaatcgcaccgatagaactggagttgttggggctattgaaaaagaaactcctgcaagttcacgtgtgttttctaaagcaggacctccaaaatttgaacttcaaatgggccgcaaatgggttgttgagaatcaaattgagaagaaagacttggtcattgaagattgtgattcaaagcagtctgtatatatttatggatgcaaaaactctgttttgcaaattctaggcaaggtcaacaatataacaattgacaaatgcacaaagattggagttgtatttaaggatgttgttgcagcatgtgagattgtaaacagtaacggggttgaggttcaatgccagggtgcagctcctacaatttcagtggacaacacttctggctgccagctatatctgagtaaagactctttagaagcatccataagtacagcaaagtcaagcgagatcaatgtattggttcctggtgctgatcctgatggtgattgggtggagcattctttgccacaacaatacattcatttgttcaagaatgagcactttgaaacaactcctgctgctcattctggaggttaaattgattgccaatttggacttttggagtctctatttatatttaaatcgttttggaatactgtgggagtggcttcaatttgttgtttcgtcaattcatttacaaacacagtcatatatataggtttaccgtatacttgctgcttattctagtgatttttccatgggtttattgaaccattggaatcatccatacggtttttttttttagtagttttcttctgattgagcgtgtttttgtcgtaagttgcattatgcaattggtttttttagctttcagaggacatctacatttgtctgaacatgttggtttgattctggtgcttttgcatatttgaggatagagcaatgattatgtactcaggtgcattcggaaagatatttgtgtatctgtttttttgaatcgattagtcctcccagtttgtattgagaaaatgaaacgagttgtgaactttctcttggcttctgcttaaaaaaaaaaaa

SEQ ID NO: 8600 - DNA, 759 bp, Glycine max
  misc_feature (684)..(684): n is a, c, g, or t
ccggaattcccgggtcgacccacgcgtccgcggacgcgggcgcgggcgcctcggcgttccatcatgttcatctggtaccagatctgtgccattcatttcttctagccatggacgagaagctcatacagcggttagaatcggcggtgttgcgcttggagtcgctatcctctggactccacccctccgcttcacaatccggcggcgcccacgctcccgatgcggcgctcgatccctccgtcgtcgccttcgccgatctgatcgaccagtacgtcggtagggtttccggcgctgcagaggttatcggcggacaggtcttgggtgtcaccaaactggtgcaggaagctttcaatgttcagaaagagcttttgattaagctcaaacagactcagaagcctaacctcgctgggttgtctgaatttctgaaaccattgaatgaagtgatcacaaaagctaccaaattgacagaaggaaggagatctgatttttttaatcacttaaaggctgctgctgacagtctctcagctctagcatggattgcatatacagggaaggattgtggtatgagcatgccaattgcgcatgtggaagaaagttggcaaatggctgagttttacagcaacaaggtgcttgtggagtacagaaccaaagacccaaatcatgttgagtgggccaaagctctcaaangagtgtatctccctggattgagagattatgtcaagagctttcatcctttagggccctgtttggagtccaacagga

SEQ ID NO: 8601 - DNA, 1251 bp, Glycine max
gtctggtttaaaacgggatgtgcattcattcaatggtgtgatcaaagcttttaggcaaggaggtcagtatgaagaggctgtaaaatcttatgttgaaatggaaaaagcaaattgtgaacctaatgagctgacacttgaagcggtgttaagcgtatactgctccgctggtcttgttgatgagggcgaggagcagttccaagaaatcaaagcttcaggaatactgcccagtgtcatgtgctactgcatgatgctagctctttacgcaaagaatgacaggttaaatgatgcctataatttgattgatgcgatgatcacgatgagggtgtcagatattcatcaagtaattggacaaatgatcaagggagattttgatgatgagtctaattggcagattgtggagtatgtctttgacaaactcaattctgaagggtgtggattgggaatgaggttctacaatgcactgttagaagctctttggtgcatgttccagagagaaagggctgctagagtgctcaacgaagcatcaaagcgagggctgttccctgaactttttcgtaaaagtaaacttgtgtggtctgtggatgtacacaggatgtcggaaggtggtgcattaacagcactgtcagtttggctgaacaatgtgcatgaaatgtccatgaccggcgatgatcttcccgaggttgcaacagttgttgtggtccggggtcacatggagaaaaccacagatgcccaagatttccctatcgcaaaggctgccatttcattcttgcaggataatgtaccatcgtcctttgctttccctggatggaacaaaggtcgcattgtttgtcagcagtcacaactgagacgaattctgtcgggcactgaatcatcatctagtagaaaaaaaatggataaattaatatctttaagtaataccccattgactactgcaggagccataacatccaaatctgatgcgcaaagtggtaaagctaatggtgttgattctagaaccgatagtacaagaacagagcttctaacgagtgcaatttagattagattagaaagtatagaatttacattcatcactttcccatgccctgttttggtctatttgaaattaagattggggcttatttgttacacttccacgaaatattcccaagtgggactggctttttcaggtcgccgaaattttggtatatatattctcaaggtaaaaaaaaaaagaacagttgtctatcgtcaccaatatttttttacctgtgt

SEQ ID NO: 8602 - DNA, 984 bp, Glycine max
cccactcgttcgtacggctgcgagaagacgacagaataccaaacttaaaattggagaagacgaaacaatttagaaaagaaaaatgaaaatagtagaaaagaaggcattaggttaagagtgaaggcagtgagcgaaagagagcatagtaatacttactgagtgcttacagttgctgcgtcgcaaggtaccggcggcgacggagaactatcttctcaattttcgatcactgcattggttctgttgtcaagggttttgttcttcctgacttgcatacttgatggcttcaaagttgcagaagttgcaggccacagcatctcaagcgtctcaatttgtatgcagtcgtggaactaactactacaagcaattgctggaacagaacaagcaacacattcaggagcctcctacagtagagaaatgcaacctgttggcaaagcaattgttttacactcgccttgctagtattccgagtcgtaatgagtccttttggaaggaacttgattatgccaagaatttgtggaagaacaggaaagagctaaaggttgaagatgcaggaattgctgctttgtttggcctcgaatgctttgcatggttttgcgctggtgagattgttggcagaggatttactttcaccggttactatgtctgataataaccacttggaaagtgtagattttatcagggctaaacactcctaaagccaactgctctggtcatttatacattgtgtggattatggcattctgcatggcaatttttgttatgataagcctcaataaccccttgtagttgaaagcgggatgaaccttgtgatgttctcttattatgttggaaagctagtgatggtactccacggtgatgatgcctcctgcaattcttttagagtgtgtttggatggaggaattataaattctaagaatttcaaatactttaattgaaattcttttattttccaaaaaaaaaaaaaaaaaaaaaaaaaaaaaaaaa

SEQ ID NO: 8603 - DNA, 2371 bp, Glycine max
caacaacctttgtgacttgccatgtgttccaagatataatctccaactccaaacaaacctctttacatgacacatgtgtatgtttgtgcatgataaattctcattcatttttgggctgcaaatccaactgggtcattattactggttctgagtggtcttgcttcagatcaggtttttttgctaagaacaactcagattttcagtacagtgttactgccaagcagaagttgaattaacgtggataatgattaccgcgcttgaagagtagaagcaataattcagcagtgtttgtgtcaaaatattttgcagctcgagtatatcaaagaactggctagttctcaatgcaaacatctcagaatcataaaatttcttatggctctggcgggttctatgctgagcctgtgcaaaatttggagtcatattgcatgccatcaagtgagaacatagacaattactcttcctctgataacagcagccaaacaacctacccttcagtccaaactttagaacaatattgcacccttgaatctgcttccacaggcaacagtttccctaaccaaaattctccacctgctctcagtttctcatctaacaatagtccattgtcaaagctagagtcaaactcatatgtgttaaggccacagcattctcttgaaattgctagtggctcgcctgaggatgattcttatttgacgcatgaccttgatgacctgacacataagataagagagctggaaactgctatgctaggacctaatgcagatatgctagatatctatggtactgtaattccagaacctgattcatttttgttagaggcagagaagtggaagaaattgatggagatgtcatctagaggggatttgaaagagatgctttatacttgtgcagaagcaatggctaggaatgatatggagacaactgattggctggtgtctgagttacgtaagatggtgtccatttcgggcaatccgattcagcgattgggagcatacatattggagtcatttgttgcaaggatggctgcttcaggaagcacaatctacaagtccttaaaatgtagtgagcctactggtaatgaactactttcatacatgcatgtgctttatgaaatttgtccatacttcaagtttgggtacatgtcggcaaatggagcaattgctgaagctctgaaggaggaaagtgaagtccacatagttgactttcagattggccagggaacccagtgggtgagcttgattcaggctctagctcaccgccctggagggcccccgaagatccgaatatccggtgttgatgactcctattcggcttatgccaggggaggagggcttgatattgttgggaaaaggttatctgcacatgcacagtcatgtcatgtgccttttgagttcaatgctgtaagagtacctgcttctcaggtgcaacttgaagaccttgaacttctcccttatgaagctgtggcagtgaacttcgccataagtctgcaccatgtgccagatgaaagtgtgaacagtcacaatcatcgtgaccgattgttgagattggcaaagcgattatctcctaaagtggtgactctggttgagcaggaatttaacaccaacaatgcgccattcttgcagcgctttgatgagacaatgaagtactacttggctgtttttgaatcgattgatactgttcttccaagggagcacaaagagaggattaatgtggagcagcattgtttggctcgcgaagttgtcaacttaatagcatgtgaaggagaagaaagagttgaacgccacgagcttctgaataagtggaaaatgcgtttcacaaaggctggatttacaccttatccattgagctccgttattaactcttcaatcaaggatcttctgcagagctaccatggacactacactctagaagagagagatggtgcactatttcttggttggatgaatcaagttcttattgcatcttgtgcttggagctaacagttcattttttgttactccaggcttctagttaggttatgtatcatccttaacttctttatacaatttctcctcacttcatagtcaaattactgttttgtaagagagcttccttaatcattatgtcagcaatgcaagtaatatcaagaaagactatatatcctgaaattttctgaggtgtattttagaacatgtaatgcttgccaaagatcagaatgatgccaatttataacagcaaagtatgtaagatgaaatctatagcaaaacaatgagtatgaaactggcacttcttggttcttactactatagtttcattttctaagcttaattgcatttctcctaaactttgttgggtcagagccttcatattcaccagtaccactgcagctcta

SEQ ID NO: 8604 - DNA, 2535 bp, Glycine max
agactttctatgtaggcgtccatataaaatggcaaaaatgcaattcacaaactctgtgacttgccatgtgttccaacctataatctccaactccaaaacaaaacctttttacatgacacatgtgtatgtgcatgataaattctctttcagtttgaggtgcaaatccaacttggtcatcactggttctgagtgatcttgcttcagatcaggttttttgctgagaacaactcagattttcagtacactgctactgccaagcagaagttaaattagtgtggataatgattgccacgcttgaagactagaagcaataattcagcagtgtttgtgtcaagatctcttttgcagcgtgagtatatcaaagaactgggctagttctcaatgcaaacacctcagaatcataaaatttcttatggctctggtgggttctatgttgagccagtgcaaaatttggactcatattgcataccatcaagcgagaacatagacaattactcttcctctgataacagcagccaaacaacctacccttcagtccaaactttagaacaatattgcacccttgaatctgcttccaccggcaacagtttccctagccaaaattctccacctgctctcagtttctcatctaacaatagtctggtggcaaagctagagtcaaactcatatgtgttaaggccacagcattctcttgaaattgctagtggttcacccgaggatgattcttatttgacgcatgaccttgatggcctgacacataagataagagagctggaaacggctatgctgggacctaatgcagatatgctagatatctatggtaccgtaattccagaacctgattcatttttgttagaggctgagaagtggaagaaaatgatggaaatatcatctagaggggatttgaaagagatgctttatatgtgtgcaaaagcaatggctgtgaatgatatggagacaactgattggctggtgtctgagttgcgtaagatggtgtccatttcgggcaatccgattcagcgactgggagcatacatattggagtcctttgttgcaaggatcggtgcttcaggaagcacaatctacaaatccttgaaatgtagtgagcctactggtaatgaactactttcttacatgaatgtgctttatgaaatttgtccatacttcaagtttggttacatgtcggcaaatggagcaattgctgaagctctgagggaggaaagtgaagtccacatagttgactttcagattggccagggaacccagtgggtgagcctgattcaagctcttgctcgccgccctgtaggccccccgaagatccgaatatcaggtgttgatgactcctattcggcctatgccaggagaggagggcttgatattgttgggaaaaggttatccgcacttgcacagtcatgtcatgtaccctttgagttcaatgctgtaagagtacctgttactgaggtgcaacttgaagaccttgaacttcgcccttatgaagctgtggcagtgaactttgccattagtctgcaccatgtgccagatgaaagtgtgaacagtcacaatcatcgtgaccgattgttgagattagctaagcaactgtctcctaaggtggtgactctggttgagcaggaattcagcaccaacaatgcgccgttcttgcagcgcttcgttgagacaatgaactactacttggctgtttttgaatcaatcgatactgttcttccaagggagcacaaagagaggattaatgtggagcagcattgtttggctcgcgaagttgtcaacttaatagcatgtgaaggagaagaaagagttgaacgtcacgagcttctgaataagtggagaatgcgtttcacaaaggctggatttacaccttatccattgagctccgttattaattcttcaatcaaggatcttctgcagagctaccatggacactacactctagaagagagagatggtgcactatttcttggttggatgaatcaagttcttgttgcatcttgtgcttggagatgaaaatcctataacagttcatttttgttactccaggcttctagttaggttatgtatcatccttaacttcttcatacaatttctcctcacttcatagtcaaattactgttctgtaagagagcttccttagtctttatgtcagcaatgcaagtaatatcaagaaaaactatatatcctgcaattttctctgaggtgtattttagaacatgtaatgcttaccaaaggtcagagtgatgccaatctataactgcaaagcatgtaagatgaaatctatagcaaaacaatgagtatgaaacttctatttcttagctcttactacagttccgttttctaagcttaattggatttctcctaaactgggttgggtcagagtcttcatattcaccagtaccactgcagcactagcaattatcctacaaaccctctcactgttccttatattgtttactcttctggtaactttatacacgaatctccatgctacttgaatttaattgaatatgggtatattctaatttg

SEQ ID NO: 8605 - DNA, 1973 bp, Glycine max
agagacttgtctgttcttttaattatacacacacactaatccaacaatcgaagagatttcgaagtccacaagcccgagggaaaaaattggatagcaaattgatcatcggcatgtgcaatacttgttatacattaattccatacacaataaaacgtattctaactactctgctacaaatgaacaaaattttacaacacttctcgtgaagggttgtgatacaagacttagaaacacagctataaaaacagagcaagtgcggttaattaaagctgttaagcgctcattcccttttatcttcctcttctgactcgtcttcttgatcaaaggatccatcagttccaccattcttctcttgccgaactaaacttagttcaccctgaccttcctgctttcccttagtgagagattgagcttcttcgtcatcagaatcttctcccacttcctccgaatatgcatacctttgagagctttgggatggggcccagagatagcatataacacagagtaatgcaaatgctagaatgtcccagaatgcagtgatgatccaagcactttgccagcgctcattgaaaggatctgtagccttgaagtatacctcatatccaatccaagcaactgaggagatcacagttactgctaatgcatttgagaacttcctatatatatccaacttgacagaacttcgttttgcctgtaactgctccagtgttcttgaaagagatgtaaaaatccataatatcaaaaatgcatctaagaaagcatcaggaagaactagaaggagccttgcccttcctgacacatcattgatggtccccacatattcagtaatattcagtaactcggatgctagaaagtaagttattccaagtaaaagaacctttgatgtaagaccacccagagtgggtcgcacaacaccataacccattgagacagagagaatgagaagtcgtgatattgattttcttatagccccaacagtgacgacccatgttgtgagcacaataggtctcattccagtattgttgaaattgacatactcaaaataccagagaatcatctcaaacaatccaagagcaatgacagctgtgatacagtgctgaagttgcagtacatcatcccaaaatctcacatactgaaaaaaccaaatgatgctaaggcaaacataagccagtgtcataaatacatagaacttctttaatggggccatcctaccaggtaaatacccatcagggtttttccatactgtctttccactcattaccatgtccttgagcttgggttcacaagctacaaaaaacaaattatacattccagtctttgtgataaaaactttctgagaatctagacttgcagttttggatctgcctttgaattgtacatctaaaatgactggccaattaatgtctgttgcagaaggtctcctaataatctctccttgcttacaaactcccatcttggctaaatcaggagtgcaacagattgcccgttgtccaccataagcagaaccacctatatcattacgatcagcagcctcaaaaattatgatgtgtactggcacagaaccgcgtgccttggctgaagctttggttctccggaaggttatattctcaaatcggatgtaggaacggccatcatcgtggacggaatagggttgggaagtgacgatgccttcgctgccgccagcgaggaggtaggaattgccgagttctctgaaaggttcatgatcgtagatgtggatggatgcgaaggtggtggtggtgactgcgaatatgtagaggaggagtgaagctgcgaagaacatggatctcgttctcgcaaatgctgaatccatgccaataaacactctcactcagattggatcggcgaaaagaatgcgcagagtgaaagagagagagaagagaaggagacatgtgagtcggtgtgtggaaatcgttgcaacgtcactctcccaaggaggaacgggcggacgcggg

SEQ ID NO: 8606 - DNA, 1630 bp, Glycine max
ttttttttttttttttttcacacatttttctttatttttctaccattaagatcaatcaaacaataatattctgcatccatgtatatattttcaaaagtcaaagtcatcctgattaggctttggggaggttaacaaagccgtgtagaggcgaagcctgtcctctcccatggaagaggaccttgacaaaggcctcctaggccttataaaggacaatgaagtcaaagtcaacctatgcttgtacctcctccatgccaattgaatggccacagcagcccaagttctccaccctggtgagtaataccttgcacttctcttcaccttctccttaacaaatgtgtacctaaaatgttgtgtcacatacttcacatcctcggcttcaaggccaaaagcctcggtggtttccaacgtgatgagtgtggatgaagatggtggaaggcgttctatgaagggtctccttaaacaccatgagaggagttcgtccccactgaagtttcctggacctaacatgcaacaactcttcacaccatcccttaggacttggctgctttgaaggtgaccccttactacaaatagcattctctgaactgggtctccttctctagctattgtttctccctttgtgaatatcagagacttcacacggtcacagatgttctctagaaccagatcgtccatgtgttgaaatagaggcacctgtctcaccaagtctagacaaagatggtatttaatgtctcttcttaatccctcaggaagatttttagtcatctcaaattcatcaaccccacgcatggcagcccaacgttgcctctcatagttacgcacgcgctgcctaaaccctagcggcaagcgtcgtttcctcatccaccattcaatattcctcatcttcaattgcattgcttgcttttttgacgttgttgcatgcaaaaataccttgatgtttccaatcaacatagtgacaagaagaaggccactggtcagcacaatgatgttgaaaactacttccagccattcggttgtactctctaggtttccaaaagtgctgagagtcattaggccccagaagatagggaaaagtatcttctccaatcgattatcgtttgtgacaagctgaacagaccatctataagctccatagttgtagttgtcaggaccatttaggcatgtgtgtctcacttccctgttctctgcccaagccaaccttgccctatccctaactagaaaactgttgcttccgtaatatatgggtgtttgacaagacaagattttcatgccacaaccacttgttttctcacactgcactttgagacacttggctgccctttgtatccctagcaagtaccaacatgcccctgctgcatgggaagcaacaaaatacgcgatcatgttaagggcgattccccaccaaactgttccaaaaatgtagccagagaggttttgcgtgcgtcgcaaatggcaaaccgaatgaaaaattttgggaaggtattggaagagaaagataattaagaacactgtcatcaccaatgtcactgaacctttctccaacaaggaggggattgccacccatagtacaatctgtggtagaggaagaataacgaacagatcaaaagggggggggggcctacgtagctga

SEQ ID NO: 8607 - DNA, 720 bp, Glycine max
caagcttagtgacactatagccaatacaagagtcaatgttgcagacgccgccacagaatcttgagttggtgggacttggttagataaatccgttgctggtttctagaacgctcttcttcaaggcgtgccgcaaacttttgcatccgaatccccgtttgttttggcagaagccatggccgatgacttcgacttcgcagataaagttcctccttcgttcgatcgcgtgggaaatgtgatcaaggattctggatccaaagcgttcaatccgggtttaattgtcctcctggttgttggtgggttgcttttgacattcctcattggaaattatgtgctctacacatatgcacagaagaccctccctcctagaaaaaagaagcccgtttcaaagaagaagatgaaaaaggagagactaaagcaaggtgtctctgcacctggagagtagagtttgtactcagtttttgttctatggtttaaattgtactatttagatgaactttctcgttctgtggtgttttgcattacgttgattttcatcgttctatatactgtgtattactgatagaaagcttagccacataagtgcttttttttttttcggtgaaggccactaagtgctttggtaatgtaggggactggctatttaatggttaaatcatcattttgcttccccgaaaaaaaaaaaaaaaaaaaaaaaaaaaaaaaaaaaaaaaaaaaaaaaaa

SEQ ID NO: 8608 - DNA, 641 bp, Glycine max
tacggctgcatacaaacgcgaggccgcggtagtatattttttggaactaaaaaaaaggcactgcgtatggatttggtttagggtttagggtaaatccgtggctggtttctggaacttttgcatccgaatctccgtttgttttggcagaagcacaggttctccgcgtcagccatggccgatgacttcgacttcgcggataaagttcctccttcattcgatcgcgtgggaaatgtgatcaaggattctggatccaaagggttcaatccaggattaattgtcctcctggttgttggtgggttgttgttgacattcctcattggaaattatgtgctctacagttatgcacagaagaccctccctcctagaaaaaagaagcctgtttcaaagaagaagatgaaaaaggagagactgaagcaaggtgtctctgcacctggagagtagactttgtactcagtttttgttctatgtttaaattgtactatttagatgaactttcttgttctgtagtggtgtgtgcattacgttgattttcatcggtttatactgtgtattactgatagaaagcttagccacataaattagtgctttggtaatatatgggacgggctatttaatggttaaatcattattttgcttccccg

SEQ ID NO: 8609 - DNA, 590 bp, Glycine max
gtctgatttcggctgcgggtacacggcgcaggggcgttctccgttcagcgccaaaacgaacaccacctaaccagctcgtgattcttcccgccgtagatctgttccttttcgccgttcctccatggccgacgacttcgaattctccgacaaagtccctccttccttcgatcgcgtgggttcaaaagggttcaacccagcattaattgttctccttcttgttggtgggttgctgttgatattcctcgttggaaattatgtactatacacatatgcacagaagaccctccctcctagaaaaaaaaagccaatctcaaagaagaagatgaaaaaggagagactgaagcagggcgtctctgcacctggagagtagaactttttcctcactctatattctgtgatgttaaattgtactcttttagaaaaaatttctcgttctgtggtctctggagtttgttaatctttatcttagtcatgtgttttactgactgaaatctcgaccacataaattaagtactttgtcaaaatataaaaaaaaaattatttcgtgcgtaactcgtcttgcccacggattattgaatatcttcgggaga

SEQ ID NO: 8610 - DNA, 1954 bp, Glycine max
  misc_feature (2)..(2): n is a, c, g, or t
  misc_feature (11)..(12): n is a, c, g, or t
tntctttgtanngatgctcctggcaaacaaaacaagaagcgccccgatacatggaaagtaattgtgtctcatctcaatggatacaaagaaatattagcaatgcactattgtcaacatactctattttttctttagctaaaacacaattattattagttgaaatttatgttaaacttgccaaatagagtgatagccactttatttatcgagttttacatccatttcaactaataatgaagtacgtgtcaaaaaggggggcagacttgctcgcattcctgtatgggataaaggacattggatatacaattcattctcaccaaatcattctctttttcctgtggaataaatatacaatttaacagggaagtacctaacctgggtaatttaatggctattgcttagccttctgtaaaacttccttcagaaccaatgcaattctctgcgacatatggggctccaggaatctctccttcactctttcataccctttctttcccattggtagcctcttctcaacatgacttgccaatttcacaatgttcttggcgagaggtgtcacgccttctttcccgacaggatgcagcaaaccggttgtcccattcaccacaatctccatcgtgcctccagctgcagttcccagtacaggcagccgaaatgccattgcttcaatggttatccttccaaaacattctccccgtgcctgagaattttgaacaagaacatcaatagcagccaggtaaggagccacagccagggttttgttaacaaagtgaacacgattctgaatctttttctcaacaacaaatttgcgaagttccatttcaaactttgtctgagcattcatatcactccctactatcacagcatgcaaaaatggcaactggagtttcttctcctgaatgagttgcaaactttcataaaaggagcgaagaaatagatcctgccctttaccacgagaaacactatttatgatggcaaaaagtagatcactcgagcccactccaagagattcccgaacatgctcacgaagaactctctttgccacactatcttctgcaacttccataagctccttgctatttccaagatgtacaacaaaagtttcaggcattttaatcccgtaacgctccctagtcctattcttccagtactctgcagttgtatgtgaatcaatcatggcacctgcaacaaaagggaggtgcttaacatattccactttgaaataatgccctcgcatttcatgaatccaccataaaacctttggaagaacatgggcaactttttccttgagaacggcatccaggccacttcccagctacggcagtatttagaatgaccatatctgctttgagagctgtatctatagccttttcacctttggcagacaggacctgcactcctctgtccaacatcttgctttccaagctgtaaacgacccgatcatgttccgaaggtttctgattagtaatccaaacaacgtcagaaccaacgcctctcagcagaaacgccaactccatcagcagcaaaggcccgcttgaaagagaaagctcgtgcgaaaccatgagaactagcttggacttcatgaaaattaggggactggaagccgcatttgtgagttggacaggggaacgaatctgattatcttgtgcaacagtaaaatggttggtgttgcaggaatcggagttgttggatctcattaagagcaccgtcactgttgagacggacaagaatgccgccaacattatcggccaccgcttcttcgccattgccaccgaatgcttcgccatttgcaaaatctctaaattcgcattctattatttttattattattattattattatttcagtttctactttctagggtttccgctgagtgtcgattgattcgaggtgcgattgcaaagttggtcgcaacctcttctcttttcagcttctactttctagttccaatcag

SEQ ID NO: 8611 - DNA, 1252 bp, Glycine max
  misc_feature (121)..(125): n is a, c, g, or t
tagcggaacaaatctttcattgacagaatggctagttttaatcgatcaaagtggtctgagggaattactgaacgtattaggtgtcgtatgtgcagttcatgacaacacttgtcgaggtagnnnnnagactatcgtgtgtcttttctccgttttaactagtttttaaatttttcaatgtttgagaaagaatgaataacaatacaataatcacttgcaaagggacccaattactcagcaccaatttgtttttactaacttccaaggaccataagtccattagattgatatcatttctcctgttatgaatatgatcgaattgattacatcttaacaactattgagcagaacaaaagaatctcattgttgaacagaggtagaaggtatgtcaactgcacgaggggtgggtgtagaagcttctgatctagactcggtggatggtagatttggcgtatttacacgacgaatctcctctatcattctcaccacatcaggcatctttggtctctgatccggtattcttgcagcacaagccatccctatttgtagcatccccaccatttcttcctctatgtttggatacctcagcagctgtacatcaaacacttctgcagtccactcctctctaaccacagaattcacccatctaactaagtggacaacctgctcaccttctgtgttgtttatgggggatttcccagtcagaagctcaagtagcagcaccccgaagctgtacacatcagatgcatgagttgctttgcgtgtgtctgttacttctggtgcacggtatccggttgctctcattgctggcatgggtattggactcatcaatgttgccaagccaatatcagatatgcatccatatccttgtgagttgaagaagatgtttgaggcctttaggtttccatgaacgagtttccctccatgttgagcgtggatgcaagcaatgcctctggctgcaccaattgcaattctcaagcggctatcccagtctaaagaacttctgccttcccctcctttgcctgcataatgcgataacatgctcacattagccatttccagaaaattatatatgtgaagaaagcctcataattgaatccaattaatttgttagcataacttataaggaagatacattaggaaaacaaatgaatattagccaaaatcaacacagtggcagactgaattgcttccctgacttatgcactgtttggacaaacttcttataagtggaaaataagaaggtaaaatgaat

SEQ ID NO: 8612 - DNA, 853 bp, Glycine max
gaaatcccgcgcgcgtgccaaaataataaaaaatggataaattaaaagaaaaaaaaagtactaatacatgacaaatagttacattgccttggaattttttttttttttttgagaacggtattaccgtgtatatttctaagttatctttacttgtcggtggtcacattaggctagatagcagggcacacaggaagaatccaataattaagagggaaaattttgaagttcggtgaggtgaggaagaagtactcctagaactagaaggagccatgggaatgttaccaaacacagttgggtaagaggttgcgttttcaggcaatgaagttggagcaagtgcgttcgtgtttcccccaactcccacagttatatgaagcttttgattcttttggcaatgaccagcctctccacttgtgaagtagaagtccccctctgatgtaatgttgaacaaggagttgccattgttcatgtacaaaatcggatctttaaggttgcagctcttgtaggattctgctgttacttgaatcactgaatcttgacttggtgggtatagaaacagaagcgaatcaccggtcctgaggttgtgatatttggaccatttgtcgtagaggtgtgaacttggtgaaatggggatcccccaggaatctagatctccaactttgtactggtagcattgcaccttggtttggatttggaccaacgtaaccaagagagacaccaaaaagaggttaaatccaggactactgagattggccattttggttctgatcacccctcacgttcaaacttggattttcttagatttaagagctgatcgaatgagcaaagggaaagggaaagggagcggacgcgtggg

SEQ ID NO: 8613 - DNA, 1476 bp, Glycine max
cgagtctatagccttgtccgactggtctcagctacgtaggccccccccccaaaacggagatagatcaagttaacgtgttgtgaaaaaaaaaatctttatttttatctctctcttagtggactgcaggcacatctatatataataagccatcatgtgcatgatttgttaattaatgtagagaaccaaccatgggtcaatactcaattcatcatcagcttgtggccatagtctcattatttatccttttgcttccaaatatccatgggtggggagacgatgggcatgtcattgtttgcaagattgcacaggctcgcctcagtgaagcagctgcagaggctgtgaagaaactgctgccaatatccgcaggaaatgatttgtccacaaagtgttcttgggcagatcatgttcatcatatctatccttgggcctctgctttgcactacgcaaataccccagaggccctctgcagttacaaaaacagcagggattgtgtagattacaaaaaaggaattaaggggcgatgtgttgtggctgcgattaacaattacacaacgcagctccttgaatatggcagtgacactaaatctagatataacctcacgcaatctctattcttcctttcacattttatgggggacatccatcagcctctacattgtggctttctctcagacaatggaggcaatgcaattactgttcgctggtacaaaaggaagcaaaatctccaccatatttgggatagtaccatacttctgacagaagtcgacaaattttatgactctgacatggacgagttcatcgatgcacttcaacagaatattacgaaagtatgggccgatcaagtagaagaatgggagaattgcggtgataaggaccttccatgcccagctacatacgcatctgaaagtaccatagatgcctgtaaatgggcgtataaagatgccacggaaggatccgtactaaatgatgattacttcctgtcacgtttgccaatagtcaatatgcggttagctcaagcaggagttcgattggctgcaattcttaatcgtgtttttgagaaaaagttggcaatgtccatctagtttattggaagagaatgagtcgacaatttgtttaattaataaaaaataacaaagtgccgactaatttgtaagcttaattaatatctaggctttgtgatttgagtaaaatgtcgatgtaagcgaataaagaaaataaagtcagagagtgaagtcagtagtatgctaagcgatgaggtgttagaataatttgcaaggctaacagattagagatcatgctttcaagtttcaatgtaccaaataaaagaaaatagtgttcctgcgttgatttctcgtgcaaaagcaaaaaaaaaaaacatcgatctaaaactcgagactagctcgtgccgaattcggcaccagatcccgtttccccccccaacatttacaagtttttaacgctgcttcttttgttttt

SEQ ID NO: 8614 - DNA, 2400 bp, Glycine max
gtcccggaacatcagctacgtcggccccccccccactttacacctctgccacaggcccacaagtagcaggggaaaaaaatagccacacaagtctcaaaacccgtaaattcttcgtctctcggtttcatctagttttccctctgttcttcttccgccacagttgatctgtctcgaacctttgtgaccaaggttgagaaacgctcactggtgggctatgagtttgagatatggcagtgtggtcttggttgctttagtgcttctgccacacatggcttctgctgcttcaattgtgaagaacctaccgggttacaagggtgatcttccattcaaacttgaaactgggtacataggagtgggagaagaagaagaggtgcaaatatttcacttatttgtggagtctcagagaaatccattcattgatccactgttaatttggtttgttggaggtcctggttgctctgccctatctgcgttcttttttgaaaatgggcctttagtaatgaatgagaattacaatggaaaccttccaaaacttgagttgaacccatattcatggacacacacgttgaatatgatatacatagacatgccagtaggcacaggattttcatactcagaaacgcaagaaggctattacagtagtgacatactctgggtgaagcatacttacgaatttctacagaagtggtttattgatcatccaaagtttagctcaaatcctttttacattggtggtggctcatattcaggaatgatcactggtcctcttgttcaacaagtatatgaaggtaactactaaatagcaaataatgtcaatatgataacctaaatgtggtcttacctcaaatgtttgtggccaagagtatcttatatatgcttcctccaagggcaggatacaaagcaagacgcaagccactcatgaacatcaaagtacaaattaaaggacacaaaccttgttgggagtatattttatatatttctaaatattttctaaactactatatataactgattaattatgacttttgtcattagggttatgtactcgcgagcccagctgttgacgggtttcgagagcagaacatgaaagttttatatgcataccaaaggagtcttataccagaagcgctctacaagtcaatgaaagaaaattgtaacggggattatataaacattgatccagaaaacacaaagtgtgtctcagattatagtgtttatgttgagcttgttcgttacataaacgaacaacaaattatggaacctctttgtattactacgcctggcgtgaatcgagaaatcctacaagaagttcaagatcctccaacattttggtgtagaagctattatcatatccttgttgacacatgggcaaatgatgaaaatgtgcggaaggcccttcatgtaagagagggaactaaagaggaattcctgagatgcaacagaaccatggcatacaccacaactcggctaaacacagtagaattttatcggaatctcactaatgccaatctcgaagctctcgtttactgtgctgatcttgatatgaatgtaccacacctgggtacacaatattggatcaattcattcaacacgagcatacgtgacaaatggcgtgcatggtttgttgacggtcaagtggctggatacacagaagtccacaaaacgaaagaagaccactacttaacatatgtgatcgtgaagggcgctggacatgtggcccagacatttaaacccaaggaagtttatcatttgatcaatagatggttttcattttctcttatttaagatgacgcttcaacttcatggagcatctctatttatctattcacaagataatattaagttaatttttgctatagctctctcaaattgagacctggaaataacatggtgacatctcagtttaattatttaattgatttaactctatcacgacaacaatttgtcaaaaatgctctattttagttgaatttttcactttcgctctgtcaagaaaaaaaaaaaaaaaaaacggggtcaatactcaattcatcatcagcttgtggccatagtctcattatttatccttttgcttccaaatatccatgggtggggagacgatgggcatgtcattgtttgcaagattgcacaggctcgcctcagtgaagcagctgcagaggctgtgaagaaactgctgccaatatccgcaggaaatgatttgtccacaaagtgttcttgggcagatcatgttcatcatatctatccttgggcctctgctttgcactacgcaaataccccagaggccctctgcagttacaaaaacagcagggattgtgtagattccaattattaattagtgaattgtaattgctttcactatatagctttgtggagtcattttaggccttaaattaaatatgt

SEQ ID NO: 8615 - DNA, 2006 bp, Glycine max
aatttacaacacaaatactgttagtgttaagctatggaatcctgtgcaactcttccactttctcagcttccttatgtctacccttcaacacttagcagcaacaaagcttatcctttttggccttgcaagcgaaggagctcatcacaaccaacacgcttacactgcagcaagatgtttgtacctggatttggagaagcatcaccagaagcaaaggctgctcaaaacctccacaatttcttcaccttcgttgcagtgaagattgttgctgctcaacttgagagctacaatcatgaagcatatgaggagctgatggaattcttgagtagacactcgttgaatgatggtgacaagttctgtgccagcatgttcagagaatcatcaagacataagaatttggccctacgcataatggaggttcgatcagcatactgcaaaaatgattttgaatgggacaacatgaagcgtctagcttttaagatggtcactgaatctaacacgaggctcatgacggaatatgtcttagaaaccagtcatgttgaaaccgagaagtgaatagtccttcattccctctgatcgaacaggagctagggcaatgtacttacttatatgtacaggaaagaacttgtctacatggttttcgaccaattttatactccagtattaacatggttatgattaaaaaaaaaacagttagatcataaaatggttgggacaagttcttgttacaaattgatgatgaacagaatatattgttatgccctccacgatatttttgggatacttggagcaccagaattatagtggtgctgtttcaaggctttgaagacagctttgaccaatttgtgcgtaatcaattttcctttacacctgaaagtgaaaacattgtccaacgatgaaacaagcaacaagcattaccttcaatcctcaatgttcaaggaacaatttcctatttgataatttacagtttcggaagcagtagcaccttcttcactaagaataagatagtgtttgttgtcagtcttgtacgtacaaatattacattacattgtacagcttaaggtttaccaagcatggactattgattataaccttcctcctatgcacctcctatttatagggcattcttggatagtgacacaatcagttgctttctgttctaaggacagaaatcatcaacaattaaagatatatgcttcctctgttttagacttggatgcatttgtcctgtactcctattgttatgactaaaccttccattacgatccaaccaagcagacttcacaatcacttatcactctatggctgcaagtgatagcaaagaggtcgagacaaagaaaggcagggcttagtagtaacaaggttgtccgctgccaaggagctttgtttccaaaccacatgcacatatgatatttttgaaaacacgttgaggtttatcttctatcagatttgaattgacactaagcagtatctgttgcatcaacccagcgatggagatcacttgaggtatgaatttcaccattgttgaagtatgaatgggcgtattcttctatgtgatccaacctatacacgtagttcaccatgatccctccactttgagaaagacctttatctgaacgatctgccatccagtttattctttcaaccatcgctccattttgcaagtgaaaatttgctacagagtccaaagcctttcctcttttcttctcttgcagaaggtacctggcacataaacgcatcaaaggggattttaatgctgacagaagttctggtgaatggatccacttataggatgtagaagtaagcaagttgaacatcacatccattccattttctccagcagcaatatccctgcatctcgtattgatattagtcacctgatagtatcctcatagacaagctagggaagcaaatagaaattactattcacattatttgtcaccacattattctttatcatgacaaccaaggatcataaaaaggataacgtttggtgactatctcgagcc

SEQ ID NO: 8616 - DNA, 1087 bp, Glycine max
atttcgtgttagcgaagacagacagatctgaagtgtgtagagttaaagactgagagagacgaagccagagaaaaccaaaaaccttactctttttcacgcgacgccctagttcatttttcttctccgttctcttctctctctgttcttcactcactctcattcattcaccatgacgaaacaacatgccaattggtctccttacgataacaacggaggatcatgtgttgcgattgctggagcagattactgcgttatcgccgcagatacgagaatgtccaccggttacaacatcctcactcgcgattactccaaaatctcccaactggctgagaagtgtgtgatggcttcatctggctttcaagctgatgtcaaagctttgcagaaggttttgtctgctaggcatttgatttatcagcatcaacacaacaagcaaatgagttgccctgcgatggctcagttgctctcaaacactctttattacaaacggttctttccttattatgctttcaatgttttgggtggccttgacaatgaaggaaagggatgtgtcttcacatatgatgctgttggttcttatgagagggttggatatagctctcagggttctggatccacacttattatgccatttcttgataaccagctgaagtctcctagcccactcctgttacctgcccaggatgctgttactccattgtctgaagcagaagcagttgatctggtcaaaactgtttttgcatctgcaactgagagagatatatacaccggagataaggttgaaatcgtcatcctaaatgccagtggtattcatcgtgaatacatggacctaaggaaagactaatgctttacaggaaattgttgttggagatacctgtcttggattgagaatgtttgaaatgcttctaaaatttaaaatgacgtagtgggtttttcccatgaggcgaaattaagaatagcatttccagtgaaattgctttgaacaagtactagtctgctcacattataactagactgctttcacttaaatttgcattggatttttgtctgagtcaatttatttatagctttagtgtgcattttctatcct

SEQ ID NO: 8617 - DNA, 1274 bp, Glycine max
tcagctacgtaggcccccccccccatcatccttatccaattcaagaaactccttatttaatgacatcttgtctctcggatcattcttcagtaccttatcgttaataatagcacgcactcttttcattctttctctgttctcatttcatcttctacacgcgtttctaatcattattagactcgatctcaacgatgaaggcaacactgctttgtccttgttcttctgctcctctgattctcgacacgcatagcaaccgaacctcggcaacgagacacgcttccaccgttgtttgttgttcgtcgaggaatcaaccctacatcccgaagctcgagccttttagccgaaccaaatttgaaagggccgttaaggaccctcctttgatcgaaaaatccgagagagagatcttagattattgttcaacgcttgaaggagaccaatcctatagctgctggcaggcttattttgagctgaaagatcttgaaaaagagtccccaaaagcagacatagagaggctgattctggagactggtggtgtaaaatccctaataggatgcttgcatgggatttcaatcatgcacaaacttaagaagggtgacatgaatctgagcaaggatgtaaaatcagaagaaggtgagagactgtgtcccatacctgatggattgccaaaatctgctgatgaactgagggaagaggagcaagcaagaatgcctgattcaccatacactaagcttcttagaaccatgggcaggcaccctgcatggtattctcctgcccctgaccatgaaacagattgatgaatgatgatcaccatacatactaagctcaaagggaatattccctttgagggcacaagtaataacatagtggagtagctataatacccccatgtgaatggaatgggtgtaaatctttggctttttttctacaaatgtaattattttgcattactcataatgtcatatatgtttcaaggagtggtaggttaaattgggggacatcatactttcattaatgtgaatgaaatgtatgcttttttttttgcaccttacaaggacaattgcgtttcatgtttttaatgtactgtatggtttaggaactcgagttagatcaatgattagatgcttttgaatattttttgcaaagcaagaaatcacgtcaaattgggataaaaattattaaggttagacctactgcttttatataaaaaaaaaaaaaaaaaaaaaaaaaaaaaaaaaccaaaaaaaaaaaaaaaaaaaaaaaaaaaaaaaaaaaaa

SEQ ID NO: 8618 - DNA, 859 bp, Glycine max
  misc_feature (3)..(11): n is a, c, g, or t
  misc_feature (71)..(71): n is a, c, g, or t
ttnnnnnnnnntttttttattttttttttttttgagtaatttaaagtggtttgaatccacctttgatcatntcttttcattaataaaaaaacccagacaatggctcaaggtcttttcagcttttacaattccactcgattattaacaactccatccatccaaacataaccaaactaatcggggaacaacagatgaaaattattgatagttttgatagtccaaatcattcagcgcactacatatgttaatgatattgattgataggttaatatcctattgaactatcaaatatttgtgccggtcaataattactcaaggcgtagttcaaaaggagagaacaaacaacaaaacgaagggcatgccaactcctcttcatggaaaaacatctgtagttacaaagaaagtatcttacactactcaatttggttatttagccgtttgggaagcttcagaggtattcgcttctataggacactgagatacgtatggtttgagcttgaaatcagtcaaatcaggaactacataatttggcaatttttcttgcatcaccacatacccacctttgcgagtgtggaaaccagtaggcttgcaattctttcccttataataaccacgaggagcacgttttgatgatagaatatcgagtgaagatggccgcttccttcgaaatgcccttcctattcctaagatgagtcccagaggcatctttttctagaaatcgcagagagataacaaattgggttggaaccttcgacgaataatcagtgaaagctgagaaagaacaaagacagtggcggtgtggcaccgtcaggactgtgagggtttagggttccgcgcgggggcctacgtagctgacgct

SEQ ID NO: 8619 - DNA, 1058 bp, Glycine max
acatttctttttgcaaagatctaggctactcctattttaatctgattactacgcttgaccattgaatgaagagtttgtacttttggaccacaaattcgcactcctttatgctacagagagagaggtgctgtgaactgcatctctctctctctctctctctctctcctgctggaaatggcaactctgcactctcttgcattgtcctctccactctccaactcacttcagaagccacgctcatgtgcagtcccatcttcaattgttcatcaaagtacaaactcttcattcaatggtcaaacattacacctgccgtgtttaaggttacctgtgctaagacaaaatactcccatgcacatgcctgttatcatgatggtcaaaccaaaaatacagttcatccagggaactgatgaacaaacaatacccgatgtgaggctgaccaaatcaagggatggaacaaatggcatggctatcttcacatttgatcaaccctcagttttcgattcttcgggtgaaataggcgatatcactggattttatatgattgatgaggaaggggtccttcagtcagttgatgtaagtgctaaatttgtcaatgggaagccctcaataattgaagccaagtatgtaatgcggagtccacgggactgggatagattcatgagattcatggagcgatactcaaatgcaaatggtttgcaattcatcaaaaaatgagttaatgtgctaactctgcccttctattcttttgcccttttcaggaagtttgtgttctacgatatagtcacatataaaacctgagtgaaatgctatattggcgtacatgtaacttcaattcacatactcatgcattttctgacaccccaagattttatgaaattttgcttgtcctgcaaaaaaaaaaaaaaaatgtaactgttttcttatagacaagttggaaagctcatcacgaaatgacttccttctattatgttttgaataagcaaaaaactgtcaggaaatatagtacacccaacacgctgcatattaatattttagtatgttttgtttccaaaaaaaaa

SEQ ID NO: 8620 - DNA, 2175 bp, Glycine max
  misc_feature (2146)..(2146): n is a, c, g, or t
tacggctgcgcgaagacgacagaaggggtcttcctcaatgtgctaatgaatctaggtagaggcaacaattgagtatatatgtcggaatgaagctggtggagcaattcttgtatttctcactggctgggatgaaatttctaagctgcttgacaaactaaaaggaaataacttagttggagactctagcaagtttttaatccttcctttacatggctcaatgcctactgtcaaccaatgtgaaatatttgaccgtcctccccctaacaagagaaaaattgtgctagcaacaaatattgctgagagtagcatcaccatagatgacgttgtgtatgtcatagactgtggcaaagcaaaggagaccagctatgatgctctaaataagcttgcttgcttgttgccatcgtggatttcaaaggcttcagctcatcagagacgtggtcgtgctggtcgagtgcaacctggagtttgctataggttgtatccaaaactgatccatgatgcaatgcctcaatatcagttagctgaaatcctccgaacacctttgcaagagttgtgccttcatattaaaagtttgcagcttgggactgtaggatcatttttagaaaaggcacttcagccaccagatcctttagctgttaagaatgctattgaacttctcaaaacaattggggcgttagatgaacaggaagagctcactccactgggtcggcatctttgtaacatacctttggacccaaatatagggaagatgcttctcatgggctctatatttcagtgcctaaatcctgccttaactattgctgctgctcttgcataccgcaacccatttgtcttacccataaacagaaaagaggaagccgatgcagcaaaacaatcttttgcaggtgattcttgcagtgatcacttagcccttctcaaagcttttgaaggatggaaggaggcaaagcgaagtgggaacgaaaaacaatttggttgggataatttcctatcccttgcaaccttgcggttgattgacgatatgagaatgcagtttctcaatttattatctgacatcggatttgttgacaagtccaggggtgctactgcttacaaccagtatagtcatgatttggagatggtttgtgcaattctttgtgctgggctctaccctaacgttgtgcagtgcaaaagaagaggaaaacggacagcattctacactaaagaagtagggaaggttgacatccatccggcttctgttaatgctggggttcatctcttccctcttccctacatggtgtatagtgaaaaggtgaaaacaaccagcatctatattagagactctaccaacatttcagattatgccctacttctgtttggtggtaatcttgtccctagcaaaagtggtgagggcattgacatgcttggaggttaccttcatttctctgcttcaaaaagtgtcattgagttaataaggaaattgcgtggggagcttgacaagcttctgaacagaaaaattgaagaaccaggatttgatgtttcgtctgaaggaaagggagtggttgctgctgctgttgaattgctgcacagttaagtcatgagataatttctttttttccagggctaacatcatgttggtctgagtcctggcattcattagatattataattagcataattttggtagcagtttttattgattgctagcaatagtatttttctggaatgtgtatgtgcaatatctgatttctttggttaaaaaggagatagtgttttgataaggaaaggagacaaggtcatgatcgaatttcacagtggattcttctgcttgaaggaacactgtagccttgggctacatatagcaatatttgactcagcatgcagtagttatatttctttcactagaatagattatacttctgcatcattctgcatcaactggcccatgattaggagaaactttcaacaactttatatcaaataaatgatgctgaaactttacaatatcaaaccaggttgtaaccttggcttatgtattttttttaaagatattaataatttttaagacttttaaagttaattaatactgttaatttttgtcaaaaaaaaaaaaaaaaaaaaaaaaaaaaaaaaaaaaaaaaaaaaaaaaaaaaaaaaaaaaaaaaagggnggaagatttaaaaggaaacacaaactaaa

SEQ ID NO: 8621 - DNA, 946 bp, Glycine max
tgatgctgttgggagcggctgcgagaagacgacgggcccgggcctcacttctcattcttaacgattccttttgagttgagttcagataccagaaaaccgaagtgaagggagtgagagatgacagtactgtctccttctctttctctgccaaagttgcattcttcttttctttgttgccctctaaaatccaagctatcatcatcagctacaaatagaattcaacaaaaacccacttcttatccacgcattagagctttggaccttgatcaaaacacggttgtggctataagtgtaggccttgttagtgtggctgttgggattggcattccagtgttctatgaaacccaaatcgataatgctgctaagcgagacaacacgcagccctgtttcccatgcaatggatctggctctcaaaaatgcagattttgcttgggaagtggcaatgtgacagttgaactcggtgggggtgagaaggaggtgtctcgatgcataaattgtgatgctgttggttcattgacttgcacaacttgtcagggatcaggaattcaacctcgttaccttgaccgcagagagttcaaagatgatgactgaggcaagctaagaataagtggtgccgattttgtttctaattgtgaggatattgtactcatgtaatttctttgatctgtgtacacacgtaatacaaataaaactgtcaaaatcatgttgatgctttcatttggtttacattttattcggtgatattaggccactcactttcgttgcttatgtgtgtaaaattttgacattttctaggcattagtttattcaattgttcaatgtcccgtgttgtaagaaaatgggcaggtctggtaaagtttcataaattattgcgggtctatgcttatgtaaagaactcaggatagttcatcacttgcgttaaacaaattctttttttaaaaaaaaa

SEQ ID NO: 8622 - DNA, 1729 bp, Glycine max
ctcgagccgttgtttttctatttcctttttaaaattatggtccggggtcgatgatttcctacactttttcgaagcttgaggaggaagagtgcctcggtattggcgatgaaaaattaagactcaatcatggcgttcatgatgaataagcggggcactacttttttgaccaaagaaaggcatcaaaaataaatcagctacgtaggcccccccccccccgtccctttgacaagcacttcttagctcgctatctctccacttttctttattgctccctccctcctctctcccacacgcttcttcttatcctcgttcccaaattttcccttcaattccatttcacatcctaccttcaacttccactattagaaagtgcacgtatgcaacaatgcttctttaccagccactcaaagaagaggtagaaaccaccatcatgatgaagggcgacaacgttttggatctgaaaacattaattgaggagcttgagtcatcaacaattgaagtcccttccgttttcatctgcccaatttcacttgagccaatgcaagacccggtgaccctttgcacgggacaaacctacgaccgttccaacatcctcaaatggttctccctcggtcacaacacgtgtcccacgacaatgcaagagctttgggatgattctgtcacaccaaacaccactctttaccacttcatactctcttggttctcgcagaagtatttggtcatgaagaagaagctcgaggacgtgcaaggcacagccttggagctcttggacacgttaaagaagaaggtaaagggtcaaaatagagttcgagctctcaaaaaacttcgccaactcgttgattcccacgtgtccacgaggaaaaccgttgaggaaaataatggttcttctttgatttcttcattgttgggtcctttcacttcccacgctgttgggtccgaagctattgggattctcgtgaatttggagttgggttcggagttgaagagaaatctcatgcaccccgcgaaggtgtcgttgttggttgacatcatgaacgagggaacaattcagacaaagatgaattgtgccaaattgattcaaacgttgttggtcgaaggtaacccttccgagacagttgttttatcaagtttgagtcttttggttggggtgttgaggttagtgagagataagaaacacccaactagtgttttaaccggactcatattactcaaaattgtatgttcacgtgaaccggttagaagctcgattataagcataggagcggtgcctcaattgattcagcttttacccactttgaataacgagtgtttggagatagcacttcatattcttgaggttttgtcaacacttcctgaaggtagattggctttgaaagagtgtccaaatattattcccaatgtggtcaagttgttgatgagagtttcggagagttgcacacaatttgcattgtcgatattgtgggctatttacaagcttgccccggaggaatgtgcttcgaaagctgtggaggcagggttggcggcgaagctactactagtaattcagagtggttgcaaccctgtgttgaagcagaaatctaccgagtttttgaaaatgtgtagtctagattactctactagtatttttatttccaaatgtatgcttactgcaacaatacaatgaaattcaaaaccaaaacaaatttgttcataattaaataacttcatacgtaaaaaaaaaaaaaaaaaa

SEQ ID NO: 8623 - DNA, 1932 bp, Glycine max
ggtccggattcccgggtcgacccacgcgtccgcgggtgtaaaattagggtattaactgatgatttgccactttgtgcctccgcttccgatgaaatcattgagatagaaggcagagtgtcatccgtaaagaaggcacttgttgcggtctcccaacgtcttcaagattgtcatcctgttgatagaaccgatcagctacgtaggcccccccccccccccgttcagtatgaagctttagatgcacttcctcgtgcaacttcaactgcagctccacgtgtgactttaactgcagctccgcgtgggactttaactgctgtacaacatgagactgtagatcatcttttgctgaggagctctgcactgtctactttatccagttcctctaacagctatgccaccagaattcattcactgccaacagaagttaatagagtctcatccttggaaccaaaagcacttaagcaggaagtcaccttcagaatactttgttcaaatgatagagttggaggagttattggaaagggaggcaatattgttagagctcttcagagtgagacaggggctacaataagtattggtcctgcagtagctgagtgcgaggatcgattaattactattgctgcttcagagaatcctgagtcaagatattcccctgcacaaaaggctgctgtgcttgttttctccaggtccattgaggttggttttgagaaggggctagactctggattaaataaggggtcaattgttactgtacgtcttgtagtcccatcaagccaagttggttgtttgataggaaaaggtggagtaatagtttcagaaatgcgaaaggcaactggggctaacataagaataattgggactgatcaggtgccaaaatgtgcatcagataatgatcaagtcgtacagatatcaggagagttttcaagtgtgcaagatgcattatataatgcaatgggtagactgcgagataatctttttgtcagcacacagaatagtgctggaacaaggagcctttcttctctacgagttgataccagtccctatgggagacagcaggatgttgttcctcttggaagtcaactgcccccagccacttctcatagtctgagtagacatacttttgctcaaggcattgatcatcttggtctttctagaaatttagatcatccttcttcaccagggttatggactagaaatttagaccgtccttcttcaccagggttatggactagaaatttagatcgtccttcttcaccggggttatggactagaaatttagatcgtccttcttcaccggggttatggactagaaatttagatcgtccttcttcaccagggttatgggcgccaccaacagtggctgggataaattccagaggcattaatgattttagtttgggattgacatctcgaaaaggcggcttagaacttgtgagtggaagtaaatctgctatcgtgactaatacgattgtagaaattgtggttcctgatgatactattgactgtgtatacggggaaaatggtagcaatttggctcgtctaagacagatatcgggtgccaatgttgttgtccatgagcctcgtcccggaacaagtgacaggattattgtcatatccggtacaccagatgaaacccaagcagcgcagagcctcctccaagcatttattcttagtggctcatgacatatctcctttccaattgcccattatttagttttgttcactgtattgtttttctgttttcctttttctctccacccgaaatcatgtaacatctagccttgtattattcccaaacagtaggtgtagtaatttaaaatcaataacttgattctttagtgcataccaaagtaagtaagcttttcattattaaaaaaaaaaaaaaaaacttttgtgcgttgtttacctggtttctttttaaaaaaaaaaaaaaaa

SEQ ID NO: 8624 - DNA, 1822 bp, Glycine max
ccacgcgtccggcgtactcagctgtgtctgtttgcaataaataactctcacctttctaccattgctctgcacctctttctccttttgtcaaattcttctgttcaacaggtgtgtgctttggaatcagcatcgtgccgcttcggtcgcccccccccgatgctaagtcggctgtagaattaatggagtcttcctcagaggttcatttttctggatttcacatggatggttttgagcaaagaaaggctagcatagaacaaccaacaacctcagaaactgacatgtataaacaaccttttgtcataggtgttgctgggggtgcagcatctggcaagacaacagtttgtgatatgattattcagcagcttcatgatcaacgagttgtacttgttaatcaggattctttttacaataacttgacggaggaggaacttacaagagtacaagattacaactttgaccatcctgatgcttttgatactaagcaattactacatgttatggacaagttgaagcatggcgaagcagtagatattccaaagtatgattttaagagttacaagagtgatgatgttttaagaagggtgaacccttcagatgttataattttggaaggcatccttgttttccatgacccacgtgttcgggagttgatgaatatgaagatatttgttgacacagatgctgatgttcgtttggcaagaagaattaggcgtgacactactgagaagggtcgggatattggagcagttcttgatcagtattcaaaatttgtgaagccagcttttgatgactttattcttccaacaaagaagtatgctgatataattataccccgtggaggagataatcatgtggccattgatttgattgtacagcatatccgcacaaagcttggtcagcatgacctgtgtaaaatatatcctaatttgtatgtcattcagtcaacttttcagatacggggtatgcataccctgatacgtgatgccaagacaacaaagcatgattttatattttactctgatcgtttgattcgattggttgtggaacatggtttggggcatctgccatttacagaaaagcaagtaatcactcccactggttctgtatacactggtgttgatttttgtaaaaggttgtgtggtgtctctgttatcagaagtggggagagtatggagaatgctttgagagcatgctgtaaaggtataaagattgggaaaattttaattcacagagaaggtgacaatggtcagcagctaatatatgaaaagttgccaaatgatatctcagataggcatgtgttactgttggaccctatacttggcacagggaattcggctgttcaagcaatttctttactcataaaaaagggtgtacctgagtccaacattatattccttaatctcatatctgcacctaaaggtgtgcatgtggtatgcaaaagttttccaagaataaagatagtgacatcggagattgagattggtttgaatgaagatttccgtgtcatacctggcatgggcgagtttggagatcggtactttggaacagatgatgatgatgagcaagtggtagtttcttcccagtagttattgtagggcagaagcagaatccacaataatttcagttgttcatcgttaccagtgagacttcctctcgaaaataggtttaaatttgttttatcacttcgtgttggggtctgaattttagttctaaatcaattttgattctattggaccttgaaataccattacgttatccttttgtttatgaaaattttatattaccttttacttaaagacaaaattattcatggatggaaaaa

SEQ ID NO: 8625 - DNA, 862 bp, Glycine max
gcctgcggctgcgagaagacgacagaaggggataaaaaagtgatttagggtttttgcacagtctcttacatataaagggaagtccttatcttatagtatcggttagctcttccatttcgcaatccgttccaaaccacataagcttcaacaaagatggatgtagaaaagttgaagaagatggccagttctgttcgaactggtgggaagggtactatgagaaggaagaagaaagctgtccacaagactactactacagatgacaaaaggcttcaaagcaccctgaagaggataggagtgaatgctatccctgcaattgaagaagtcaacatctttaaggatgaaatagttatccagtttttaaaccccaaagtacaagcatctattgctgccaacacttgggttgttagtggttcaccacaaacaaagaagttgcaggatattctccccaacatcatccaccaattagggccagataacttagaaaacctgaagaagctagctgaacaatttcagaagcaggttcctgaagcaggagatggtgcaaccgcagcacaagaggatgatgatgatgcggtccctgatcttgtcccaggggagacttttgagacagctgctgaggagactaagtcttaagagtttttactgtgccatcttttatatatttttatggttgttactaaatctgggaattatcatgcacgattatggaggaaaagtgatctggatttgcagaatacagaaaattataaacagaaacatgcaagatttcaacttgaagttcaaaaaaaaaaaaaaaaaatttgtcatcatcaattgggacatttgacgttggatttaaactgcgtgtcatgtagagcattac

SEQ ID NO: 8626 - DNA, 2614 bp, Glycine max
ggtatatcactatcaggtacatggtttagtctagagtgaatcatatccaagattttatgagaaagctcacttttcaattaaaagaattcctttaatggccaagtaaagcatactagtatttccacatatggcatattggacagatgtatctgtcatctctcttgtgctgctactgcgtttgctatggtccaggtggaacatgggctctttattccttgctctgtcgacatgcaaacatcagaaccattcccaaccagcatcgtactgatgaagagctaacaacatatagtcggtctacaatccgtgagaagtcattcgctgcgaaaaccaagagatggttagaggaaacaccttatatgaaaaatatcattcttatgctcgcccttggtggtacctgcatggtgattggagatggtattcttacaccagctatatctgtgttatctgccgttggtggcatcaaggtgaatcacgctgatttgagtaacgaagtagttgtgctggttgctgttgtaatattggttggggtattcagcatgcatcattatggttcagataaagttggttggctatttgctccaattgtccttctttggtttcttctaattggaggcataggaatattcaacatctgtaaatatggcagcagtgttctaaaagctttttcaccattgtatatataccgctatctacaacgagaaggcaaagatggttggctttcccttggtggcattttgctcagtataacagggacagaagctctttttgctgacctagcacactttccagtctcttctgtacagattgcatttactctgctagtgtttccttgccttcttttagcctactctggacaggctgcttaccttatgcataacttggaccattcaaaagatgcgttttatcgttctattccagacaaaatatactggccagtatttgttgttgcaacattagcagctatagttgcaagccaggccacaatatccgcaaccttttcaattattaagcaagccaatgctcatggctgtttcccgagaataaaagttgtacatacatcaaagaagttccttggccagatatatattccagatatcaattggatccttatgattctatgcattgctgttactgctgggtttaaaaatcaaagtcagattggaaatgcatatggtactgcagttgtgctagtcatgctggttacaacattgcttatgattttgatcatgatacttgtgtggcgctgccattggattctggtggtggtgttcaccggcttatcgttgattgtggaatgcacatacttctctgctgttctcttcaaagttgatcaaggtggatgggctcccctagcaattgctggagcatttcttctgatcatgtatgtctggcattatggctcagtgaaacgctacgagtttgagatgcatagtaaggtctcaatggcatggattctcgggcttggaccgagtttaggacttgttcgtgtcccgggaatagggttagtatacacagagcttgcaagtggagtaccccacatcttttcacatttcatcacaaacctaccagccatccattctgttgttgtttttgtatgtgtgaagtatctccctgtctacactgtcccagaagacgaaagattccttgtaaagagaattggacccaagaacttccacatgtttcgttgcgtggcgcgatatggatacaaagatctgcacaagaaagatgaggattttgagaaaaagcttttccacaacctctttgtgtttgtcaagctagagtccatgatggaagggtgctcagattcagatgactacagcttatatgatgagcagactgagaggtcaacacaaggcctattgaacaataacacaaacacagctgcattgaatatggatccaacagtttcatcagtggattcaattgtatcagtctcatctccattgcacattaatgctactattcaatcctctggtcatgttagcagccacaccgaggtcgatgaagttgagttcttaaacaactgcagggatgctggggtggttcacattctaggaaacacagttgtcagggcaaggagggattcaagattccacaagaaaatagctgttgattatatatatgcatttctcaggaagatatgcagggaaaatagtgtgatcttcaatgttcctcatgagagtctattaaatgttggtcaggttttctatgtatagcctctactcctcttctcttggtaattcttgcgtgaacattgagtttataggcacattcaatcaaaagcatgttaaaatagttaataataataaaatatgtattgaaatctatatgttaatattgttttaatattattcaaaagcttttgattgattgagtttataaacatcttgatcacactaattgttccacttgagcccaagataagtaagatttatcatttgtgacagtcattttgtgtacagttgagcttagcgtagcatatgaacaactccttatggtgtgcagtgtgtactatccaaagggaatgtcttcagaagaatgactttgggtaatttctgttgaatcctgaaattcattattcatttgatgttccaaatgcatcactatgttgttc

SEQ ID NO: 8627 - DNA, 1354 bp, Glycine max
tcgagtcagctacgtaggccccccccccgcattgtgacctggaggtcacaggtttaagtcctggaaacaatccttctgctttgtgtggggggttaaggctgcgtacatttgccctctcatactaggtactgcagttgttatagtcatgctggttacaacgatccttatgattttaatcatgatactagtgtggcgctgccattggattctcgtcctcgtcttcactggcttatcattgattgtggaatgcacatacttctcctcagtactcttcaaagttgatcaaggtgggtgggttccacttgccattgctggagcatttcttattattatgtctgtttggcattacggcaccgtgaaacggtatgagtttgaaatgcatagtaaggtctcaatggcatggattcttggtcttggcccaagtttaggacttgttcgtgtccccggaattggactagtctacacagaacttgcaagtggagtgccccacattttttctcatttcatcaccaacctaccagccattcattccgttgttgtttttgtatgtgtgaagtaccttcctgtctacacagtcccagaagaagaacgattccttgtcaagaggattggacctaagaatttccacatctttcgatgtgtggcacggtatggctataaagatctgcacaagaaagatgatgattttgagaaaaaactctttgagaaccttttcacattcgttcggcttgagtctatgatggaaggatgttcagattcagatgaatacagcttatatggacagaaaatagagcatccaagagatggccttttgcataacaatggaagcacagtttcttccaatatggatttaacaatgtcctcagtagattcaatagtaccagttagatcaccgcatcacatgaatattactgtcaggtcttctggtcaaacaagcagccagaccaagttgacgaatttgaatttttgaatacctgcagggatgctggggtggttcacatactaggaaacacagttgtgagggcaaggagagaatcaaggttctacaagaaaatagctgttgattatatttatgcatttcttaggaagatatgcagggaaaattgtgtaatcttcaatgtccctcatgagagtctcttaaatgttggtcagattttctatgtatagcatagccccatatccttgtgattgccattttttttgcaaaatgagctgagtgtagcatatgaacaacactttgcttatggtaatcaagatacaattcggaattgacttagaagaatggctttttggcaattatctcttaaaaattgaaagtattgctcccatatggctaaaaaaaaaaaaaaaaaaa

SEQ ID NO: 8628 - DNA, 1010 bp, Glycine max
aaccccaaggacagagagtgtgatgttatctatctccttgtccttcttctccctcctcatcttctctccccattcggcaaacatacagcatccaaaatcgaatctttgtttgaaacatggcttcctcctccttcctctgccccgcagcatttaccttctcacagaagccacttcaatccacttttcttcattcctcctctcttctcactctaagcattcttcctaagaaattgagaaaaccccaccaactgagaagcctcatagtggccaaatccaatggcagtgactctgctgatgttcctgaccgtttgatttcagcactttgctacttttaccctttctttgatggcatacagtatggaaaatatgtaatcacacagttctaccctgttcaagccattgttcaaccattggttcctgcaataagagtcttcaagagcttcccttttaatggattccttgtgtttttgaccctttattttgttgtggtgagaaaccccaatttcagtaagtatgtgaggttcaacactatgcaagccgttgtccttgatgtgctcttgattttccctgacctccttgaaagagggtttaatcccaaagatgggttgggattggatttgataatgagtttggatagcactgtgtttttgttcctcttggtgtgcttgatttatggttcttcttcttgcttgctgggtcaaatccccagattacccattgttgctgaggcagctgataggcaagttctttgaatcaccaatccgttattgagataatttaattgtatagcaaagcaacttcagcctaagtagtggaaaagtttgcattttcacttccttaatagttactatcttggaaagtttctgcaaaacggattttagttgtttcttacattgctggattctagtacgtctttctaaatcaggattaaattattgtaagatgatgagaaacttccctttctccattgttaattgaattcgatgttatatcgaaaaggatttactgaa

SEQ ID NO: 8629 - DNA, 1800 bp, Glycine max
tcagctacgtaggcccccccccgatatctttccttacttcctcgtcaacaatcattgttcattcggcgaattatcctattcaaccactcattgcctttcgatctctctctctctcctgcgacacaacatctcattctaaattcccttcaatttcatctctcacacatccatacctcttcaaaccataaaaaaaaaattaaaatgattcaccttttcgcgttaataagtcacttcccaaatcgtcaagctattgatggtgtgatgagtctcaactctctagtaaggagcttgttggattgaaaaaggaacttgtgtgggttagcagatggttggttgtgagggactgtggggggttcttatgaagagttctggaactactgagttgaataccttttaccccattaaagcagaatgccaagctgatgttccagccactcgatttaaaccaagggctggcaaaactctaagtcaaagaagatggcaggcatcattctcccaagatggtcacttggatattgcaaaagtgctaagacgaatacagagagggggtgtccatccttcaatcaagggggaagtgtgggagttcttgctaggttgctatgatcctaacagtacacttgaagaacggaatgagctcaagcaacgcaggagggggcagtatgatatgtggaaagctgaatgtcaaaagatggtcccagtcattggtagtggaaaatttattacaacacccctcattgatgatgaaggccagccaatagatccttctatggtaggcgtccagacttcagataagaaagttgtgcagtggatgcaattattacatcagattggtctggatgttcatcgaacagatcgagcacttgaattttatgagactgaagctaatcaagcaaaactcttcgatgttctagcagtttatgcttggttggacaatgatattggttatgtacaaggaatgaatgatatttgctcacctttgattattcttgttgagaatgaagcagattgctactggtgctttgaccgtgcaatgcgaaggatgagagagaacttcaggtgcagtgcaagttcaatgggtgtccaatctcagttggctacactctcacagataatgaaaacagttgatccaaagcttcatcatcaccttgaggatttagatggaggagaatatctctttgcatttcgcatgcttatggttcttttccgaagagaattttcttttgcagatactttgtatctttgggagttgatgtgggccatggaatacaacccatacatcttcacaaaatatgaggatccagatcatgcaaaaacaaaaggccccttgcctccaacaaacgacaaacatttgaagcaatatggaaaatttgagagaaaaaatgtgaagactgggcatacagaggaaaatagtgcactgtctgtttttcttgttgcaagtgttcttgagatcaagaataggcggattttaaatgaggccaagggcgtggacgatgttgtcaagatcttgggagacataacctcaaatcttgatgctaaaaaagcacttaatgaagcactgaaaattcagaaaaaatacctaagcaaggccaagaagggatgacaaagacaacaatagattttctgtaactacatgatggcagctgtgtttgcatgatcttctgaggtttcagttgctcttgacagaccattgttttctttctttcattctttttttttagtctcttagtgatggcaagcagtccctgctctgcctgtgttgaaaatcaaattataatcttatacaaaaaaaaaaaaaaaaaa

SEQ ID NO: 8630 - DNA, 1480 bp, Glycine max
tcagctacgtaggccccccccccggtcagactattctagagcaattggaaggccttcctaggcataaagcaaatgccagatatgtgaactatgttgcagaaaaggacaaaaataatggtaatttatatgattcttcacttttagctaataataacatggagcttttctctgagcctgggcatgctaaggtgtttggtcatgttcgtaagctttcaaatgagagtgttgaaagcgatggaagctcaatacgaggtagtgacatgtctaattttgggattccaagttcatctggtgatggctctcatgaccttcctggatctgctttggtttcaagagagacagatattatgggccacacaaagtcgaagtctactggtgatactcaattagtccttccactagatcaacgcaataaattgaacaggattctttcaaccatgcagcgaaggctaggcactgcaaaaactgatatggaggaccttatagttagattaaatcaagaaatagctgcaaaggattttctcgcaacaaagctcaaggatttggaagtagaacttgaaactaccaaacagaaaaataaggagaacttgcagcaggctattctaattgagagagaaaggtttacccaaatgcagtgggatatggaggaacttagaagaaaatcattggaaatggagatgaaattaaagtctgaatcggggagaaattcttatcaggatttgactaaggaatcaattgttcagcagaatgatgtactgtatgagaatttagatgctactaaggaaaaaatgtgaagactgggcatactgaggaaaatagtgcactgtctgtttttcttgttgcaagtgttcttgagattaagaataggcggattttaaacgaggccaagggtgtggacgatgttgtcaagatcttgggcgacataacctcaaatcttgatgctaagaaagcacttaatgaagcactgaaaattcagaaaaaatacctaagcaaggccaagaaggcatgacaaagacaacaatagattttctgtaactatatgatggcagatggcagccgtggttgcatgatcttctgaggtttcagttgctcttgacagatcattgttttctttctttctttttagtcttagtgatggcaagcagtcccctgctcttcctgtgttaatcatttgaaaatcaaattataatcttatacttaggaaaaaaatacttcattattgatgtctggatatccagagaaccagaatacttcattttgtgggattctttgttggcgggatttcatgttgtagaaatattttataggtaaggaagatcttttcttcctgaatgaggggacatttatgctatcaaatcaaaactgataaaattgtaacgtatatatttttaaccgaagtacagttaaaaattcagagtgatatatagtacattcacaattccacatttttcttaaaaaaaaaaggggggcccgccgatta

SEQ ID NO: 8631 - DNA, 1636 bp, Glycine max
ggtcagactattctagagcaattggaaggccttcctaggcataaagcaaatgccagatatgtgaactatgttctcagctacgtaggccccccccccaatgtatatgattcctcacttttagctaataataccatggagcttttctctgagcctgggcatgctaaggttgttgctcatgttcgtaagctttcaagtgagagtgttggaagtgatggaagctcaatacgaggtagtgacatgtctaattttgggattccaaattcatctggtgatggctctcatgaccttcctggatctgctttggtttcaagagagacagatattatgggccacacaaagttgaagtctactggtgatactcaattagtccttccactagatcaacgcaataaattgaacaggattctttcaaccatgcagcgaaggctaggcactgcaaaaactgatatggaggaccttatagttagattaaatcaagaaatagctgcaaaggattttcttgcaacaaagttcaaggatttggaagtagaacttgaaactaccaaacagaaaaataaggagaacttgcagcaggctattctaattgagagagaaaggtttactcaaatgcagtggaatatggaggaacttagacgacaatcattggaaatggagataaaactaaagtctgaattggggcgaaattcttatcaggatttgacaaaggaatcaattgttcagcagaatgatgtactgttggagaatttagatgctactaaggagcagctggaaattttgtcaaaacagtatggagagctagaagccaaatccaaagcagatgttaaagttctggttaaagaggtcaaatctctccgtaattcccaaacaaagttaaagaaagaacttagtgagtctataaaggaacacagtgaaactgagaaactacttctgcacgaaagagagaagagggagcaggcagaagtggctcggagaatactgctggagaaatgcagggttcttttcaaccagcttcaagagtgcaatgtcagtcttccttacgaatacgaaggtaggacaattgtgaattcatcatcatcaactgatgcttttaatcaattaacgacatctgatgaccaaatggacatcctactagcagaggtagaaaacttagagaaggactacggaagtgcagcttgcaatgtagataaaacgaatgacataaaagatggtgtaatctgtgatgatgaagtgagaaagatcatagcagatttgttcatcgataatgttagattgagaaaacagacaaaccgcgtcacaaggcatgccctcaaattggatatgacagcaagtgatgattccccttcagtggaaactgtaacaagtattgagaaatatatgtgaagtgctaatatatatattgttcttcggcttttgaccaagagcccactgtttcttatcccggtggatgatcatttgccgttcccaataggtgagttaatatactgagtgcagtagctcccctaatgtatttcaacttgtactacgagtttttactttacacacgtatacgagccttgcaccacatttttttatgaacttaaaataatgaaaagccggaactcatcaaaggtaaaaatatgtctaaaaatgctttgtt

SEQ ID NO: 8632 - DNA, 1550 bp, Glycine max
gtgtgacataaggatactttggaagaagacctttcatcaagattctgattgatgcctctccctccacgtccgttgccgcagcaagagaactcatatgattgtggcctatttctgcttcactacctagagctgttccttgttgaagcacctcttaatttcaatcctttcaaactaaccaagttttccaactttctcaatgtggactggtttctgcctgctgaagcttttctcaagcgaacactgatccagaagttaatctttgaacttgtggaaaatcatggttcacatgaaatctcttcctctgactgtagtggtgatgatgagtgcttagaaaataatgataacagaactgggattgatcaccctgaagtcaataaggagccaacaacttctcatgctgggcagggaatagaaatcactctattgtctggttcatcgtctttggatcctcaatcctttaacaattcaggattggttcttaaagagctttttgatccaggagctactgcaggagcaatgttgggacagtgccaatcctttgaccagcggtcatctgattatcgttcaatattttcgatggaggaagacacggatcttggggaccagtttatgtacttggctacagatcccaactaccagcaagtggctggaattacacctcaaacatgttcattgccatatcttcctagggattgtggagatgagaaatgtcatagaccacaaatctctctgctagtggatcgtgatgtggtgcagccatctttagatggatcaaatagtgtcttggatgattcagaagatataacagtctgcaaaaattgccttgttgtgaatgagcctgggtcatctaatgaacctgaacaaggtgagaaaacttgttcagccatggaaaaagctgagcatgttatagatatttccaactcggtggtgggaaattctctagactcgattacgaagtgtgatgataacaagaatggagatctccactcttctggtcaagaaactacgacaatttcagtgcagcagtttcctgatgcattagatgatgaggaagctccaacaataccattacaacaagtttctgatgcagtagatgacgaggaagctcccacaacaccattgaaacaagtttctgatgcagtagatgatgaggctggatgtgatgatggtcagatgattgatagcatggagcctgataattgtgaggaacaagctgcaaagaggaggcggcttatgcctctgcctctacggtgcagaagtggcggcattgggacagaatccgatttgtagataacttgatatagataaatatggcatcttcttttacctttggttttgaattatttctaggttttactttatcattatgtgaatagtgtcgttgcttggtagtagttaattctgcgaccaaaactgagaaatatctgcggactttaggtacaattcaaccgggcaatgatatgatttttttttccttgatgaaatcctttgaaattcgttctccctctgtttcttatattctaagatccagattatgaattttacgattg

SEQ ID NO: 8633 - DNA, 937 bp, Glycine max
gattttaaccgattgcgtagaaatatatcaaattctaaaactcacctgcacacgacacacacgatggttgaaatttgaagcaaagcacgtgtttgtgtgtgtagttctctctctctctctctctctctctctctctccaggctccaatggctttctctgcaatgactagcatgcactctcctcaatttctccgccttcccatctcccttccccgttcttcaccctctggtcgattttcaccgccaattctcaaacgccctaaaccactctccattcgatcagtttcaattcctgctgcaccagcatcagggtctctggcccctgcaatttctgttacggataatgcgctgaagcacttgaataagatgaggtctgaacgaaatcaagatttatgtttaagaataggtgtcaaacagggtgggtgctctggtatgtcatacacaatggattttgaagacagggttaataaaaggccagatgattcaatcattgagtatgaaggttttgaaattgtttgtgatcctaagagcctactcttcatatttggcatgcaattagattacagtgatgctctgattgggggaggcttctctttcaagaatcctaacgcgacacagacttgtggatgtggtaaatcctttgctgccgaaatttagaaccatgtttatagtcaatagtttgtttctacaacactctggactaaatatagacttttattactaacataaatatatttatatgcattgtcaaaaaaaaaatgtactgaatggaatgcttgttatttgtatttctgtttgtatttgtttcgctgcatcattagtcattcatcttttcaatttgtttaaggaaaaaaaaaaaaaaaagcgttcatggttaatgcatttttgaattgatggaacgagaggggatgaaatggaatgaactaaattgtaatgga

SEQ ID NO: 8634 - DNA, 1255 bp, Glycine max
atagtgctaacccgggcccacggaaaatttggatttggattttgctctaaatcacattctttgcttcttttttcttactttcttgttccttcttcagcttggatttttggcgtaacgaggaaggggttattgttgagaaaccctagcctaaacctaaaccatggcgcataggttgctgagagaccacgaggccgacggctgggagcgctcagatttccccatcatctgcgaatcctgcctcggcgacagcccctacgttcgaatgacaaaagcagagtatgacaaggagtgcaagatttgtacacggccattcactgtttttagatggagacctggtcgagatgcaagatataagaaaactgagatctgtcagacatgtagtaagttgaaaaatgtctgtcaagtgtgccttctggatcttgaatatggactaccagttcaagttcgagactcggctcttagtattgattccaatgatgccattccaaagagtgatgttaatagggagtattttgctgaagagcatgaccgtaaggctagagctggtatagattatgaatcctcttatggtaaagtacgcccaaatgatactatcctgaagcttcaaaggacaactccatattacaaaagaaaccgagcgcatatttgcagtttctacataaggggtgaatgtactagaggagctgagtgcccttatagacatgagatgccagtaactggggaattgtctcaacaaaatattaaagatcgttactatggggtgaatgatccagtggctttgaagctacttggcaaggcaggagagatgtccaccctggaggctcctgaggatgagagcattaaaacgctttatgttggtggacttgatgctagggtcactgagcaggatttgcgggatcacttctatgcccatggagaaattgaatctatcaaaatggttctccaacgggcttgtgcttttgtaacatatacaaccagagaaggtgcagaaaaggcagcagaagaactctccaacaaacggggtattaagggccttaggctaaagctgatgtggggcaggcctcagacaacgaaacccgagtctgacaggtctgatcaagcaaggcagcaggcatctggagctcatagtggattgtagcctcgggcgggtatatcacagaagcagagccaggaccaaacgcaaggaatgctgtactatagcaatctaccgccttgtcaggcggagagaagctactacccatgcatggatcctgaa

SEQ ID NO: 8635 - DNA, 2042 bp, Glycine max
tttagactcctctccgcactcacctacttagtgtttgaagtcttttgttctacgggtcctcttttatcctaactagcaacacccatttgtaataggctactttattttttaaactcttttaaaaaagttaacctagcttttctttgcatcctctgactgtcttccaccggtcaccgcaaaccaccaccgacctccgttcgactgttagtggtggtcgatttacatgtaatgtaatgtaagacgttggggtccttttgttgtttcatgctaaatacagaaccataatctcttgtttcttcttcagcttccattttggttcaacgagcgagcgcttttcgttatttccctaagcatggcgcataggttgctcagagatcacgaagccgacggttgggaacgctccgacttccccatcatctgcgaatcctgcctcggcgacagcccctatgttcgaatgacaagagctgagtatgacaaggagtgcaagatttgtacacggccattcactgtttttagatggagacctggtcgagatgcaagatataagaaaactgagatctgtcagacatgtagtaaattgaaaaatgtctgtcaagtgtgccttctggatcttgagtatggactaccagttcaagtccgggacacagctctcaatattgattcccatgatgccattccaaaaagtgatgttaatcgggagtattttgctgaagagcacgaccgtagggctagagctggtatagattatgaatcctcttatggtaaagtacgcccaaatgatactatcctgaagcttcaaagaacaacaccatactacaaaagaaaccgagcgcatatttgcagtttctacataaggggtgaatgtaccagaggagctgagtgcccttatagacacgagatgccagaaactggagaattgtcacaacaaaatattaaagatcgttattatggggtgaatgatccagtggccctgaagctacttggcaaggcagtggagatgaacactctggaggctcctgaagatgagagcattaaaactctctatgttggtggacttgatgctagggtcactgagcaggatttgcgggatcacttctatgcgcatggagaaattgaatcaatcaaaatggttctccagcgggcttgtgcttttgtaacatatacaaccagagaaggtgcagaaaaggcagcagaagaactctccaacaaactggttattaagggcctaaggctaaagctgatgtggggcaggcctcagacatcaaaaccggagtcagatggctctgatcaagcaaagcagcaggcttctgtggctcatagtggattgttgcctcgggcagtgatatcacagcagcagaaccaggaccaaacacaaggaatgctttattataacaatccaccacctcttcagcaggaaagaagctactacccgtcaatggatcctcaaagaatgggtgctcttgttgcatctgaagatgattctcctggtgggccttctgtgtcaggggagaacaaacccagtttggggaagcagcaaatgcaacattatgcccatccaatgatgcctcctctagctggccaataccatcatcagtattatcctccgtatggttatatgctaccagttcccccttatcaacagcacccacctccatacaatgctgcggtggctccatcccagccaccagctgtaaatcatccttatcagcattctatgcagccagggtcttcacagacagactctggacaggctgcacatgccccagctgaatctggaacatcaacatcaggatcgcagcagcaataaacttgcccatatactgatgtttctagctatgctctatctttgagtttttccttaaactaactatggtgacagggaagatattttcactcaagttgccaatttactatctctactagctcgatatttgattgccttgtggcttgaacaatttattttatcatttgattttgtgcttttgtaactcttggcttcctggtaagatcatagtcatgctcagctttagtattgcttattg

SEQ ID NO: 8636 - DNA, 1626 bp, Glycine max
gacaaagcccggaaccaaagggctcaaatcttcccattttgccccctcccctcggggcaattagagattcttcttcgggtggttttgacagataggtcattttgtgccgtgcatggtgatggtcttctctgattgaaattccacacactgcctcctctctccaatttggtacaccggttagatggtatgcagcagttgtgtaaggtctttggttgttcaagctggaaccttcgtcaacagagtgagaatcaacgaatttgggaggagtttgctggcggttcagagtttttctcattggccgattcgtgaatacaagacaatcacagggatgatggttgatacgggttctatgtcaagtgctggaccccttgttgatatgatgccagagaaagatgatgatggtcgatttgctagtggagggtggaaaagtgaagatggaagacttagctgtggttattcaagttttaggggaaagagagtgacaatggaagatttttatgatattaagacattgaagattggtggccaatcaatatgcttatttggaatatttgatggtcatggtggttctcgtgctgctgagtatttaaaggagcatctttttgataatctcttgaagcatccaaattttttgacagatgccaaattggctataagtgaaacatatcaacagactgatgctaattttctggattctgaaaaggacaccttcagggatgatggatctacagcttcgacagcagttttggttgataaccatctttatgtagcaaatgttggagattctaggactataatatcaaaagctggtaaagcaaatgctctctctgaggatcataaaccaaatagaagtgatgagcggaagagaatcgagaatgctggtggtgttgtcatgtgggcaggtacttggagggttggaggggtgctagcaatgtctcgtgcctttggtaaccgtatgctgaagcagtttgtagtagcagaacctgagatccaggaccaggagatagatgaacaaattgaattgcttattcttgcaagtgatggactctgggatgtagtacaaaatgacgatgctgtttctcttgcccgcacggaagaggagcctgaggcagccgcacgaaagttaacagaagcagcattttctcgtgggagtgcagataacattacatgcattgtggtgcgattccaccatgagaaagcagaagtagctaatcctgataaagcagaatcaactagtactcagcatgagtagatgatgtgaaagcacaaaatgcacgtgttggttatattcgcgtcaaattgaatgaattgaggtcagcacgtgcatgatggttcactctgcatggcacaaggcaatttatttattctttagttttcttatgtaagtcactcttgttcgtgtattgggatttttgaatcgtgttcttctctgataactgatttcagtgtgtccgtatatatttcaagttttcctgtttgtagaggcatcaagttggtatttttgttctgatctaataaatgcaatatgcattttttttatcatactgatatgtgataaagtagaaatcgattaatttaaaattgtaaaacattactatgaaagaaaaagtcgacccggggtcgccg

SEQ ID NO: 8637 - DNA, 826 bp, Glycine max
gaatattggtcgatttgaaatccctatgaacaataggaattccaacatcagaacttgaatggagataagcaagtccttttgcagctcccagtgccacttggagtcttcgaggccaatccatgtttctttccccaattccattcaaatgatcttgcaggttccctctacgcatatattcatatactaggaacctatgctttccatccgcacagtagcctatcaaagaaacaagatttgggtggtcaagtctgctcaagatgtcaacttcaacacgaaactcacgttccccctctgctgctttaattgctggcaactccattttcttgattgctacaacctctcctgaccgcaaagtgccccggtagactttgccaaatcctccttttccaagcagattctcatcactgaatgaacatgttgcctcctccatctccttgagtgtgtaaacagatgatccatgtagcctttttgtaggtcgtggtgtttgatcttcaagttgccaaagctgtgcaggtttgtaaacccagggatctgtatgatcttgagatttgcttctacggcgcttgttccaggccgagagtgagaccaaaccaaatggcatgattgattactctatcttatatgttctcagcttaagaattgaagtgttaggttctaaaaacagaaaacaattggacagagatgactaattgtattacacacttagagatacaggtgattttgccaagaaccttgaagtaaaacactcttttgatacgatgagagggtgaagtaatgactttggaatagttggcatgtgggggggggccatacgtagctgactcga

SEQ ID NO: 8638 - DNA, 1131 bp, Glycine max
  misc_feature (1111)..(1111): n is a, c, g, or t
  misc_feature (1119)..(1119): n is a, c, g, or t
  misc_feature (1122)..(1122): n is a, c, g, or t
cccagggttttcccagtccccgaccttttaaaaacgcggcccagggaattttattcggctcccctatagggggatttggttccggccccccccttggagtcaggtaggtaggccccccccccccgttgcattcacttctttattccaaatcacagtctcatcttcatcttcatctttgcatgctatcagagcctcagcttctgagtatgttccctcccaacacacccttagaagggaattcttgaagggtgttgctgctttgatgcctcttccacttgttgtgctgatagagccacccccttcagatgctagagaagttgaggttggctccttccttccaccttcaccctctgacccttctttcgttctcttcaaggcctctgccaaggacactccagcccttcgtgcagttctttgcaggaaatgtgcagccatacaagtttatcctccccccgacgtggaaacaggctcgtgtagcaaatatactatctggaaattactgccagcctaaatgtgcagagccctgggtggaggttaagtttgaagatgaaaaacaaggaaaagttcaggtagtggcttcgcccttgatacgccttaccaacaaaccaaatgcaacaattgaggacattgggagcccagaaaaactgattgcttctcttggaccatttgtcactggaaacacttttgatccagaagagctccttgagacttcagttgaaaagcttggtgatcagacatactacaaatacgtgctcgaaacaccatatgctctcacaggcacacacaatcttgcaaaagcaacagcaaagggaaacactgttgttttgtttgtggttagtgccaatgacaagcagtggcaaacttctgaggagactctaaaagccgtgcttaattcctttgaagtttagttttctgtcaaaggtaaataagagaagtttatttctttctagtttttgtttatacaaaattactcagaaagaattgcattggccaccatttcaattttttgtgttccgaggttaaactttaacttttaacagtctggcatttttcttcttagtatatacctaattgagtgaaaaaaaaaaaaaaaaaagatttcttgcagccngggggatncantagttctag

SEQ ID NO: 8639 - DNA, 2388 bp, Glycine max
aattgggttcgaggagagagagagaaaatcagaacacgctttgaaactgaaagagagagtaagtgaaggtgtgtgtgtgagagagagaatcaagagagaggagaaaacagagacaaacgctgtctgtgcgagttagagagagagagaaaccccagaaaatcagaaaatctaacccccattttttctctctttagtttccatttgatcggaggctctcattgtggttttccgattatcgtcgaatcagctccgttctccggttcggttcggtgcaatggagcagtacggccggtccagtgaaggttcgcggtctgatccgtcgccggaatgggccgggcccgaagcccaaaccgggctcgaagagcctgtgtggcaattgggaatgggtggtggtgctggggaggaatcgtatccgcaacgccccgatgaggttgattgcacttactatttgaggaccggcttctgtggcttcggttcccgctgtcggttcaaccatcctcgtgatcgtgccgtgggtgccggagctgagaggactgcaggggagcatccggaacgagtaggccagcctgtgtgccagtatttcatgaggacaaggacatgcaaatttggttcatcttgcaagtaccaccaccccaggcaggcaggagcagggggcgctgctgctacccctgtgtcactaaattattatggatatccattgcgacagggtgagaaggagtgttcctattatgtgaaaacaggacaatgcaagtttggtgcaacttgtaaattccatcatccagttcctgctggcatccaaattccaccatcgccatttgccccagtttcacctttgcctgtaccagtaccttcgccgttatattcaaccatgcagcccccacctggtccttcgtcccagcaaattggtgtgctggttgcgaggcctcctatgctgcctggctcattagtccagagcccctatggacctgtggtactgtcccctgccatggtacctatttctggctggggtccttatcaagcttctgcatcaggtgctgttcttccttctggtactccatctaatgttggttcagcacagctttatgggataacccagctaccttcaccagcagctgcctatcctggaccttatccaccttctggttccccagttggtcctccaagcagtagtcagaaggagcaggcatttccagaaaggtctaaccaaccagaatatcagtattatctgaaaacaggggaggttaaatttggtccatcatataggtataaccctccaccggacatgagtgtgccggacatgagtacgccaaaagcaaatgtgattcttagtcctgcaggtcttcctttgcgcccgggactaaaactgaagtctgtggacgaatcaaattagggataaaccagccattgtctccttacattttctccagtagccaacatcagggggcaccagcttgcactcattatgcacaacatggagtatgtaagtttggttctgcatgtaaattcgatcatcctatgggatcaatgagttatagtccatctgcttcttccctggctgacatgccagttgcaccctatcctgtgggttcaacaattgctactcttgctccatcatcttcatcttcagagttgcggcctgaacctagctcaggatccagtaaagagtctgttccatccagaatgccttcatcaacattgactgggtcaatcggctcgactttgtcgactggtggacccatttctcaatcgagcactcaaccaccttcccaaagttcaggtcctttagccgctgtcactagcaccacaagtagcaatgtctctcacacctcaagctaagcaatgtgaatgcatacctcatcattactccttttttcaatctcaattcttccactggacataattattcaaggagatcctccaataggttttgttttcagttatcctagttccattctcaggtctagcacacttcacaccaattatctttgtgttcatataaactttttgtggccatccctttgatcttgaataaaccatggccatccttgagaattttagcaatccatacgatcaccttgcttttgaataactcagaatctgcaaggccattgtgcacatgccctttcacatctccaataggttgtgctgcttatttgtgctccaatcttttttgatatgagaacattctgtccagactttcgtttatcatgtgtttatgtctcttcatctgaacccttttttaatttgggaacaattttccatttctgccttgtaagtcctgttcaacaattttcccaacttgtatctagggtttaatgtgaagagaagtaatcaggagactacaatgaggcttcacattgctatcttataatataaggtttagataaa

SEQ ID NO: 8640 - DNA, 817 bp, Glycine max
agcattgtttcctttccattgctgatatatgacaaaacacccgtagccatccaataagaccaccacacacacacacacacacatttcttcaaactcactcctttctttccattccctcactttcacacccacaagtcacacccacttggttccttcctccaccccattatttttttctctttttttgatccaaacatgtcctccacacacccaaaaaacccagcaacgacaacaacatccactactctcatcgtgctctcaattatactcctttgttttccgacaaccgcaaaaaccgacaaccctccatgcccttatccgtgttacccaccacccattggaacggttactcccaccactccttcaggtggttccactgttccaccagcaccacctcaacccggattactatatccaccaccttctgggaattacccttattaccccacaccaccttacggcggcggcggtggtgttggcagcaacgacggtagcggtagcggtagtggtggttttggcagcccaccaccaccggaccctattctaccctactttccattctactacagaaagcctcctcacaagccagaagacaattcagcatcaacaaccactatgtacaaatggacagggatggttggtattactagtctattatcttcatctttgcttcttctctttgtataactctcatgaatcatgatcaaaatcttcatgtaatatctaaacagttaatttaatgcttgctaatttaatggtattttttaagatttttttttaatatatataatgctcccgctgaagttcgaatttaaaa

SEQ ID NO: 8641 - DNA, 1149 bp, Glycine max
  misc_feature (260)..(264): n is a, c, g, or t
tctagagtcgacctgcagcctcaccacccatcaccaactccactttgatttttcctctgtccaattaaatgcaactaaaccgtttttggtatctatttattaccattagggtacgtaataattaacaactcaataaaccgaattttttactaaaattttcttaatcattattttgagaacaatgaatagctaaacctaaaaaaggcaccaactaactaaagcaaagttcatttaagtagtgtcattaattaccatgaccnnnnnttttaacatctccgaagtacatgcttgacttctccttaatcacatccaagtcgctataacttcactttcaattcttagcaatatgtagcattgttttccgttgctgaaaatatgacataacacacgtagccatccaataagaccaccagttcaccacacacacatttcttcaaacgcacttctttctttcctcaccttaattctattcactctctctcactcacaagtcacacccacttggttccttcccccaccctattttttttcctccttttttcccatccaaacatgtcctccactcacccaaaaaacccagcaacaataacaacatccactactctcatcttgctctcaattatactcctttgttttccaacaacctcaaaatccgacaaccctccatgcccttatccatgttacccaccacccattggaacggttactcccacaactccttcaggtggttccactgttccaccagctccacctcaacccggattactatatccaccaccttccgggaattacccttattaccccacaccacctttcggcggcggcggtgtcggcggcaacgacggtagcggtggcggtggttttggcaccccaccaccaccggaccctattctaccctactttccattctactacagaaagcctcctcacaagccagaagataattcagcgtcaacaaccactatgcacaaatggacagggatggttgctattactagtctattatcttcatctttgcttcttctctttgtataactctcatgaatcatgatcaaaatcttcatgtactatctgaactcttaattttatgcttgttaatttaatgaaaatttctttttttttatttaaattttaaaaaaaaaaaaaaaa

SEQ ID NO: 8642 - DNA, 1796 bp, Glycine max
cccacgcgtccgcccacgcgtccgctcactcctccccacacggctcgtgttttctgctctcagctgctacatacatcacctaccccttctctgttcattgctcaattgtttccctcacaactcataacctctttcccatttaacctttgaaaaaattccatactgtaacaacagatcaccatggctctatcacgtttgtcccaccgcagcatcggatccactctcacaaaacccttctccgccgccgccgcctcctcccgttcgatctccacctcggacacccccttaacaatcgagacctctgtccccttcaccgcgcacaactgcgaccccccgtcacgcgcggtcgcgacctcctcctcggagctcctcaccttcttccgcgacatggccctgatgcggcgcatggagatcgccgctgactccctctacaaggccaagctcatccgcggcttctgccacctctacgacggccaggaggccgtcgccgtcggcatggaggccgccatcactaaaaaggactccatcatcaccgcctaccgcgaccattgcatcttcgtcggccgcggtggcacgctcctggaggtcttcgccgagctcatgggccgcaaggaaggatgctcgaaggggaagggcgggtccatgcatttttataagaaggagagtgggttttatggtgggcatgggattgttggggcgcaggttccgttggggtgtgggttggcgtttgctcagaagtattctaaggacgagagtgtcacttttgctatgtatggagatggcgctgccaatcagggacagctctttgaggcgcttaatatcgccgcgctttgggatcttcctgctattttggtctgcgagaataatcactatgggatggggactgcggagtggagagctgccaagagtcctgcttattataagcgtggggattacgtgcctggcttgaaggttgatggtatggatgttcttgctgttaaacaagcttgcaaatttgcaaaggaacatgctttgaagaatggaccccttattcttgaaatggacacttacagataccatggacactctatgtctgatcctggcagcacataccggacacgtgatgaaatttctggtgtgagacaggagcgtgatccaattgagagagtaagaaagctggtattgtctcatgatattgctgctgaaaaggagctaaaggacattgagaaagaagtcagaaaagaagttgacgaagccattgctaaagcaaaggagagtccaatgccagatccatctgatctatttaccaatgtctatgttaaaggttacggagttgagacatttggtgctgataggaaagaagtgagagctactttaccataattcagaactttgtcctttgaatatcttgccaccttgtcgtagcagactcttcaaaatagtgaagaataaaaggttctacagagggtcatctctctcccctattcgttgagtttctgcccgcgtgtatagtgtgaatttattcatatgcttggttagcaatggggcggggtttgttatttttttgtcatgtaatatttgcggatctaacagccaaagcatcattgtgattgatgcaactggggtgttctgcaaatttgaggaatacattgtgcactactgaagatatgtagttcagaatattttagacacgtcaaacagttcaaaaatctatatagatatatattaaagaataggctggtggaaagtctaaaatagatatcttatatttttgacaaaaaaaaaaaaaaaaaaaaaaaaaaaaaaaaaaaaaaaaa

SEQ ID NO: 8643 - DNA, 2100 bp, Glycine max
  misc_feature (1903)..(1905): n is a, c, g, or t
  misc_feature (1910)..(1911): n is a, c, g, or t
ccacgcgtccgcctcagtccacacctaaccctccaacctcaaacaaagtaacaaaaacccattttttcctcttctttgcatcatcattctcattccttctttctaaactaaccaactttttttcaaacaaattcgattctttcttcatttttaacctaattttcttttcgatccaaaaaatggctctctcgcgcgttgttgctcaatcgtcgcaatcgaatcttctgaaacccctagcgtcgtacttatcactacgacgccgttcggtttcgacttcgtcagacccactcacgatagagacctcggtgcccttcacctcccacaactgcgacgcgccgtcacgcgccgtggagacctcctcggcggagctctttgcgttcttccacgacatggcgctgatgcggcggatggagatcgcggcggactcgctctacaaggcgaagctgatccgcggcttctgccacctctacgacggtcaggaggctgtcgccgtcggcatggaggccgccatcacgcgcaaggactgcgtcatcaccgcctaccgcgaccattgcaccttcctcgcccgtggcggaaccctaatcgagatcttctccgagctcatgggccgccgcgacggctgctccaaggggaaagggggatccatgcacttttataggaaggaaggtggcttctacggtggccatggaatcgttggggcgcaggttccgcttgggtgtggcttggcttttgctcagaagtattgtaaagatgagaatgttacgttttctatgtacggtgatggtgctgccaatcagggccagttgttcgaggcgcttaacatttccgctctttgggatctcccctccattttggtctgcgagaataatcactatggaatggggacagctgagtggagagctgctaagagtcctgcttattacaagcgtggggattatgttcctggattgaaggtagatggcatggatgctcttgctgtgaaacaagcttgtaaatttgcaaaggagtttgctttgaagaatggtcccattattcttgaaatggacacatacagataccatggccactccatgtctgatcctggcagcacataccgtacacgtgatgagatttctggtgtgagacaggagcgtgatccaattgagagagtaagaaagctactattgactcacgagattgctactgaaaaggagctaaaggacattgaaaaggaaataagaaaagaagttgatgaagccattgccaaagcaaaggaaagtcaaatgccagagccatctgatttatttaccaatgtatatgtaaaaggctttggtgtcgaggcttgtggcgctgataggaaagaagttagagctattttgccctgatggaaaacttttcctttgaatttcttttccttagttttggaccgatcaaaataatgaagaataaaaggttcagaagatcatctctgcctatttgttgagctttccccaaattgtatatgaaattgattcttcagtagcaatggggcggaaattaatgttttgccatgtaattttggaggatctaacactcatatgacctcaattgattaagcatgcaactagtgtcctgcaaatttggaggatttcgttatgcaaaacctccatgattggcaaaattttgccattattttatttttaggtattcacaagattgtgttccaattgaaaccattttttggctataagagtctttggacagttaaaaatttgatgcctgtacattgcagattgaattggtgatacaggttggattatgttattttctttttctgttctttactaaattaaaaaaaaaagatgttcaaaaaaaaaaaaaaaaaaaaaaaaaaaaaaaaaaataaaaaaaaaaaaaaaaaaaaaaaaaaaaaaataaaaaaaannnaaaannggggggggcccctttaaagggaccaagtttacccccccggggtggaaaagataaactttttttttagggccccctaaattaaattccggggccgggttttaaaccggggggatggggaaaaacccgggggttccccaattaatgggcttggggaaaaaccccctttttgcccgtggggaaaaaaggaaa

SEQ ID NO: 8644 - DNA, 1972 bp, Glycine max
cgcgtgcgtgcggctgcggaaacgacagaaggggaattcgatttttttttcctttcatttctaacctaattttcgtttccatccaaaaaatggctctatcgcgcgtggctcaatcgtcgccatcacagtcgaatcttttgaaacccctctcgtcgtacttatccctacgacgccgttcggtgtcgacctcgtcggagcccctcaccgtggagacctcggtgcccttcacctcccacaactgcgatgcgcctccacgcgccgtggagacgtcctcggcggagctcttctcgttcttccgtgacatggcgctgatgcggcggatggagatcgcggcggactcgctctacaaggccaagctcatacgcggcttctgccacctctacgatggccaggaggccgtcgccgtcggcatggaggccgccatcacgcgcaaggattgtatcatcaccgcctaccgcgaccactgcaccttcctcgcccgcggtggaaccctaatcgaggtcttcgctgagctcatgggccgccgcgacggctgctccaaggggaaaggaggatccatgcacttttaccgcaaagaaggtggcttctacggtggccatggaattgttggggcgcaggttccgctggggtgtggcttggcttttgctcagaagtattgtaaggatgagaatgttacgttttctatgtacggcgatggtgctgccaatcaggggcagttgttcgaggcgcttaacatttctgcgctttgggatctcccctccattttggtctgcgagaataatcactatggaatggggacagctgagtggagagctgctaagagtcctagttattacaagcgtggggattatgttcctggattgaaggtagatggcatggatgctcttgctgtgaaacaagcttgtaaatttgcaaaggagtttgctttaaagaatggtcccattattctcgagatggacacatacagataccatggccactccatgtctgatcctggcagcacataccgtacacgtgatgagatttctggtgtaagacaggagcgtgatccaattgagagagtaagaaagctactattgactcacgagattgctactgaaaaggagctaaaggacattgaaaaggaaataagaaaagaagtagatgaagccattgccaaagctaaggaaagtcaaatgccagagccatctgatttatttaccaatgtatatgtaaaaggcttcggtgtcgaggcttgtggcgcggataggaaagaacttagggctactttgccctgatggaaaacttttccttttccttagttccttagttttggacaaatcaaaataatgaagaataaaaggttcagaagatcatctctgcatatttgttgagctttcccctaattgtatatgaaattgattcttcaatagcaatgaggcagaaattaatggtttgccattaattttggaggatctaacactcatattacctcaattgattttgcaagcaactagtctcctgcaaatttggaggatttcgttatgcaaaacctccatggttggcaaaattttgccattattttaattttaggtattcaccagattgtgttcaaatgaaatctttttttttttggctattaacaattcatgtttctttggacagttaaaaatatgatgcctgtacattgcacagattgaattgttgatacaggttggattatgttattttatttttctgctctttacttacgtttatgtctcgctatatatagggaaataaattctgttgattttattttaaaaaaaaaaaaaaaaaactcgagactagcctgaaatgtttttaacttacagatttcacgattatagtgaaattttaatgtgaattgtatatggtgaatcagttgtaatattacaataatcaagtcatattccattagatgatgtgggttatatggatcatatgatgtcatatgatgtcatttaacatggtt

SEQ ID NO: 8645 - DNA, 1951 bp, Glycine max
cacgcgtccggcgtgcgggtgcgtgggcattgcttccgcgatcagcttcttcgtcggttgtgttagggtttccgaagtttcactttcccttcgtttcttctcactcaccacatttcttcatcgcaatgcgtttccgagaccgataattgacactattcaacgcaaagtcgcagttccatcatagttttgtttcgcccaactcgcgaaatcgaaagctttatctacacggcacgacgcgttgttcctttgtgagaagctggagatggcgagaaaaactagtaactgtgccatatgcgagaattctaatcaagcttccatttgttccatctgtgtcaactacaggttgaatgagtataatacttcattaaagttactgaaagaccgtcgagattcgttgtactcaaaattgagcgaagttcttgtccgcaagggaaagggagatgatcaagcaaattggagagtgcttcaacatgaaaagcttgcaaggttgaaggagaagcttcgtcagggtaaagaacaagttactcaaggaagagctaagatagagactaagtctgccgatctgaaacttaaatatgggttgcttgaatctgccctttctacgctggaaaagaatcgagtggaacaattgggagaaattctatcctaatcttatttgcacccagagcttagggcatgtggctattacctctgagcgtcttcataaacagtccgtggtcataaaacagatatgcaagttgttcccacaacgtttatgtgctgagagacccaatactctcccggggggccatagagggagagagaggggatggctgttgtggtcaatttgatcaaatttgcaatgcgcgattaccccgagctcttgatccccgctctgttccatcagaagagctttccacttctttgggatacatggtgcaacttctaaatcttattgttcataacttggctgccccagcacttcataactcaggttttgcgggttcttgctctcggatatggcaacgagattcttattgggatgcacgtccttcctcaaggagcaatgaatatcccctttttatacctcgccaaaattattgctctactgacggagaaaactcatggtctgagagaagctcaagcaattttggagttgcttcggtggaatctgagaggaggcatcgcctagattcatctgggagtactagctttaattattctttggcttcttcgcattctgttcaaacacacaaagatttgcagaaaggaatttcacttctaaagaaaagcgtagtctgcatcacagcttactgttacaactccctgtgtttggatgtcccttctgaggcatctacatttgaggcttttgcaaagttattggcaacactcgcatcatccaaggaagttcgatctgttttttccttgaaaatggctcgctctaggacatgcaagcaagttcaacaattgaacaagtctgtttggaatatgaattcggctatttcatcaactactttgctggaaagtgcacattctgtgcccacaacgagaattgaaaattatctgccaagttctactggtagttttctttatgccgctgatttatctgacggcaaaaatgagtgcctaattgaagggtgggatattgttgagcatcccacttttcctcccccaccatcgcaaagtgaggatgttgagcactggactcgagccatgttcatagatgctaaagggaagtgatcttaatttgcaacctttcaacaaaattttcttctcagaatagttaacaagaattcacccattgatatgggctcagtaagtaatatcacctttacacataagtgtatgttcgctaaatactttttgagaaataatcattcattttatttcttttaaaaactctcagaaaacttttttcccacataaacttaaatcaaatgtgtgctaagcactaatatttactccttagttt

SEQ ID NO: 8646 - DNA, 1058 bp, Glycine max
tagtcaacaactattaaatttttatagagactgggattaaattttgaaatggttttctctagaaaaagaaataggcattaaaaaatctgcgagaagacgacagaagggggatatcgttgagagtttttacaggcctggttcgggagactataggatacggctttttatccgaactgaactcttggggaagggaattccacccactcatcaatggcatctactctcttcgcttgcccgtcgttgtgttcctcctcttcttctatattttctacttccgtcaaattctccttaaacccgaataaaatttctcttccgttcgccggaaacaaaaaacctctttcggctccaattcgaaggcggttcaatgtcattgctatggctccccctaaacccggtgggaaggccaagaaagtggttggaattataaagctggctcttgaagctgggaaggctacacctgctcctcccgttggccctgctcttggttccaagggtgtcaatattatggctttctgtaaggattacaacgctagaaccgccgacaagcccggttatgtcattcctgtggaaattacagtctacgacgataaaagctttactttcatattgaagaccccacctgcttcggttctacttcttaaagccgctggggtggaaaagggttcaaaagaccccaaggcggaaatggtaggaaaggtcacgattgatcaattgcgtacaattgctgctgaaaagctaccggacttgaattgctcgagtatcgaatcagctatgagaattatagcgggcactgcggcaaacatggggattgtggttgatcctcctgttcttgaacccaaacagaaggaatttgtgtagagaaatttcagtttggccgagtgtaaaatcgcgcaggacatatttactgacttgttttgtcttctaaacagcaagggaaacagttctttttagttatttgttatttgcatgaatgatatttaattacatagcatatcatcataaaagagatgtggcaactagtgttgttcactgggtcattaacatggaaattcaactcc

SEQ ID NO: 8647 - DNA, 1457 bp, Glycine max
caatgctcctcagctgtcaacaagtgcagggcacagtagagaagcttctggtgaattaaatccagggccagaaactgctggtactacttctgtggcatcagtgcatagagaacctgagttcccactccgattggagacaaggtctcgaagtcaagccatttggaggcggccatcagagaggcatgttcctaggatagtatcttctcctgttgttgaaacaagagctgatctttctgctattgaaacccaggttcggaatttggttgagggcttgaagagctctgatgttgatactcagagagaggcaacagcagaactccgccttcttgctaagcacaatatggataatcgaattgcgattgcaaactgtggagccattaatgtattagttgatttacttcaatcaactgatacaacaatccaagaaaatgctgttactgcacttctaaacttatcaatcaatgataacaacaaaactgcaattgcaaatgctggtgcaattgaacctctgattcatgtgcttgagactgggagcccagaagccaaggagaattcagctgccactcttttcagcttatcagtgattgaggaaaacaagattttcatagggaggtctggggctattggaccactggtagaattattgggaagtggaacccctcggggaaagagagatgctgccactgctttgtttaatttgtcaatatttcatgaaaacaagaatcggctcgaggcaagctggtgctgtgaggcaccttgtggacttaatggacccagcagctggaatggttgacaaggcggttgccgtcttagcaaatcttgccacaattccagaaggaagaaatgcaattggtgatgaaggtggtattcctgttctggttgaggttgtggagttgggttctgcgagaggaaaggagaatgcagctgcagctcttctacatctttgcttacatagtcccaaattttcaagcaaggtgcttcaacaaggagctgtcccgccattagtagctttatcacagtcaggcaccccaagggccaaagaaaaggctctcctcaatcaatttaaaagtcaaagacatgggagttctgggaggggctgatcttgaattcccaactcgtgtggtatccaaaggttttgaattaactcctgtataatgtccaatttatatattacatggtgcaaataatgtgtgtaaaggtgttttgtatcgttttctcttgcttggaaagggaaaaaaatatttgtggaggattgattgtgtcctccttgtgaaaaacctttctgtattgcaaaaaaattatacatgtaagtctagcttttgtattaacaaaaagggtccggtttttgttgttgtggtaatggttgtggacaaataaaacatttggtttatttagtgacactgtaatttcccctttcattgagatagggatgtaggtgtaaactgttatgttcatgc

SEQ ID NO: 8648 - DNA, 1557 bp, Glycine max
  misc_feature (6)..(6): n is a, c, g, or t
  misc_feature (582)..(582): n is a, c, g, or t
tcgagnagctacgtaggcccccccccttgctggaaagggttttgttgttactcctactcttggagagtacatggctgctgatgcaaataagatattggatgatcctgggttaagaaaactatatgcacccaatggaactttgttgaaagctggggatgtgtgtagaaatgttgaacttggtagcaccttggaggtagtggctgagcaagggccacaagctttctacaatggaaccattggtgaaaatttagtcaaggatgtcagagatgctggtgggattttaacaatggaggatttacacaattacaagttggaagtaacagatgcaacgactgtgaatgtgatgggatacaccatatatggaatgccacctccttcatctggaacacttgctctttctctgttatggaggttctaatgctgcaaggggaaatcttggtctacatcgactaatagaagctctgaaacacatgtgggctgttcgaatgaacttgggtgaccccaactttgtaaacattgatgatactatatccaaaatgctttccccatcttttgcaaaagatattcagcacatgatacttngataacactactttccctccagagtactatatgaacaggtggagtcaacttagcgatcacgggacaagccatatgtgcattgtcgatgctgatagaaatgctgtatcactaacaacaactgttaactatcattttggagccgggtttcgttctacttctactggtatcttggtcaacaatgagatggatgacttctctactcccactgatatatccccggataaactacctcccgctccagcaaattttattgaaccaaacaaaagaccattgtcttccatgactcctcttattgtcacaaaggatgatcagttggttggggtacttggagggagcggtggaatgaacattattgcagccgtagttcaagtctttcttaatcatttcatcttgggaatgaaacccttggatgcagttgtgagcccaaggatctatcacaagctaataccaaatgtagttcgttatgagaacttgactgctcataatggcgatcacattgagctttcaaaagaaagtaggcttttcctagaagagagaggtcatcaactgagaggttctgaagcactagctgtgactcagcttattgtgcaaactctcaaaacgcctatgaacttcaataggaaagttggtgaaaacaccaaatcacttacaaagcatggcactctaacagcagtaagtgaccctagaaagggtggatgtccagctgctgtttaattatattgatcaattcaggttcaaaattgttaaaaaacagaggcatttcaaaacaattttcaattttttagccatgttgtatcaacaccatccaggacaaaaaaaaaaaaaaaaaaagaaagaaaacgatttggtcatcattcttcaaacaattaaaaacccgatgaaactttgttttctgataccgcagttacgcacttagaatacaaggtgaactgttttttgcgagaataataagccattggttagttattgtgggat

SEQ ID NO: 8649 - DNA, 1431 bp, Glycine max
cccacacgtcccaaccaagccaagtactctccaatctctttcatcataaacaaagattcttctctattctccaactcttttgcttcttctttcaaagtggcatcaaaaactagaagaaaatggggtgtggcaatttgttcttcacagtcctcataaccttctcagtggcactcataacatacaacatcataatctctgccaatgcccctctcaagcaggacttcccaggcccctcacgcccctccatcaaggtggatcccctcatcaagatgccactccacagatcatcatcctcggagaaatcaaaaaagaggttgtttcacactgctgtcactgcctctgattctgtgtacaacacgtggcagtgcagagtgatgtactattggttcaagaagttcagggatggaggaggagacgaatccgggatggggggtttcacccggatcctgcactcggggaagcctgaccagttcatggatgagatccccacctttgttgctcagcctctgcctgctgggatggatcagggttacatagtccttaatagaccatgggcatttgtgcagtggcttcaacaagcagatattaaagaagattacatattgatgtcagagccagatcatataattgtcaaacctatacccaacttagccagagatgggctaggagctgcatttcctttcttttatattgagcctaagaagtatgaaactgtgctaaggaagtacttccctgaggagaagggaccaataaccaatattgatccaattgggaattcacctgttattgttggaaaggaattcctcaagaagattgctcccacatggatgaatgtttccctggcaatgaagaaggatcctgaaactgataaagcttttggatgggtgcttgaaatgtatgcttacgctgttgcatctgctcttcatggtgttcgtaacatattatacaaggacttcatgattcagcctccatgggatcaagaaattggcaagacatacataattcactacacttatggctgtgactatacaatgaagggtgagctaacctatggaaagattggagaatggagatttgataaaagatcttatgataaagttgctcccccaaagaatctgacattgccaccacccggtgttccagaaagtgtggtgactctcgtaaaaatggtgaatgaagctactgcaaatattccaaattggtggtcatagggaaggttaaaggtgttgcaaattacgatagttggagaatgcgttggacctatggccattttaaatggaagggcattgtacacgtcattgcttatgtatttatgcattcttcgaatatagtttgaccagtgagtgagacaaacctgtggaattgatatcactggtgcttctacaaaatgctttggttcaacttgcttcaccttaattttcattaatccca

SEQ ID NO: 8650 - DNA, 905 bp, Glycine max
ccacgcgtccggcccaagccacaaaacaaaaccctagcacagaactttatacggccaagtcccaacacaatctcatcctccccctgcaaaaccctaattcccaccgcaaggtaaaaaaaaaaaaaaaaaccagtggtgcgcgatgccaccgaagttcgatcccttgcaggtggtggacgtgttcgtccgagtcaccggcggcgaggtcggcgcggcgagttccctcgctccaaagatcggtccattgggtctctccccaaagaagatcggagaagacattgcgaaggaaaccgcgaaggactggaagggcctccgcgtgacggtgaagctgacagtacagaaccggcaggcgaaggtgacggtggtgccctccgccgccgcgcttgtcatcaaggcgctgaaggagcctgagagggacaggaagaagacgaagaacatcaagcacagcgggaacatctccctagacgacgtcgttgagatcgccagggtcatgagtcctcgctccatggccaaggatctcagtggaaccattaaggagattctcgggacttgcgtttcggttgggtgcaccgttgatgggaaggaccccaaggatctgcagcaggagatttctgatggagatgttgaggttcctcttgaatgaagttgctgaaatttcagtggttttttgttgtttcgtttatgttgtttttttgggcaattttggtttttttttctttttataaaggaatttgagtcataggaatggtatgatagttaagactttggtaaatgatatcacattgttgggtttttgagtaattttgtaatggagttgtgatttgtattgttgccaaaaccatttgtcaaattttaaggttggatcgtaagtttgttatctgctctaaagaaaaaaaaaaaaaaaa

SEQ ID NO: 8651 - DNA, 986 bp, Glycine max
ctctctcccgccagcgccctaattcacacccaaagagaaaagaaaaaaaaaacaacagtggtacgtgatgccaccgaagttcgatccctcgcaggtggtggacgtgttcgtccgagtcaccggcggcgaggtcggcgcggcgagttctctcgccccgaagatcggtcccttgggactctccccaaagaagatcggagaggatattgcgaaggaaaccgcgaaggactggaagggcctccgcgtgacggtgaagctaaccgtgcagaaccggcaggcgaaagtgacggtggtgccatccgccgccgcgctggtcatcaaggcgctgaaggaacccgaaagggacaggaagaagacgaagaacatcaagcacaatgggaacatctccctcgacgacgtggttgagatcgctagggtgatgagcccgcgctccatggcgaaggatcttagtgggaccatcaaggagattctcgggacttgtgtttcggttgggtgcaccgtggatgggaaggaccccaaggatctgcagcaggaaatttctgatggagatgttgaggttcctcttcattgacgttagtgaaatttcagtgtttttttttatttgtttcgattatgttgtttttgttttcggcaattttggttttttttttacaaggataaaggaaattgagtcatagaaatagtatggtagttaagacttaagagtgctggttggtaaatgatataacattgttggaattttgagtaattttgtgatggagtggtgatttgtaggggttgccaaaccatttgtctaattttaaggttggatcgtaattttgttatttgccgtattgtcgtgtctttttgagttatacctttgtattactggtatttatgagaatgtggttaatgtgtttctaattgtaattgtgttatgttgagacagaataccttatattgccatgaaaatttaaactatattataaaaaaatataataaatttattc

SEQ ID NO: 8652 - DNA, 1503 bp, Glycine max
agaaaaggataaaaaacaaactcatgaatacaaacacctacccttcccttccaaaatgcccttgacaattcttctctaaactcggaagcaaaacaaaaagccatagctatgagtggtgaagcgcgatcctgtgactactgtggccactccacagcacttctttactgcagagccgattcagcaaaactctgtttctcgtgcgatcgcgaggttcactccaccaaccagctcttctcgaaacacacgcgcacgctgctctgcgacgcatgcgatcattcccctgccaccatactctgttccaccgacacctctgttctgtgccagaactgcgactgggagaagcacaaccctgcgctctccgattcccttcacgaacgaaggcccctcgaaggcttcactgggtgcccttcagtctccgaactcttatccatcgtggggttttcggatttaagcaaaaaatctcttctttcttcgcctcagggaagtggcgctgatgggatcttcggtggagaaattgaagggctttcggatttgtttgtgtgggattctccttctttcgttacgcttgatgatttgatttcttcttctccttcttctcatagctttcaggccatggaggttcctcctctgcccaagaatcggaaggctgcttgtgggcaacacaaagaagagattcttagtcagcttcgggaattggccaagtctgagccattggaccttgaaccatatgtgtcatcggggaacttgtcctcgggttttgaacgtgaaccagaggctgatatctttccttctcatgagtggcatagagaaagcagcgagcctatgtatcaggttgttcctcctgacccattaatgagaacttatacagaagaaattccatttaaacattctacttctgctgttggggaaactcaaacctacggtgacaatggaggaaaaccatccatttctcttaaatctgaaaccctatcaactactcccaaagctgcagcatgtgagttaacaagccaagaaagagattctgcattattacggtacaagcagaagaagaaaactaggagatttgacaaacacataaggtatgaatcacgaaaagttcgggcagaaagcagggtaagagtcaagggtcgatttgccaagatggaacatgaacattgaaatcatggtaggctgctatgacatcataactataattcccagctcaaatcacatgcactatgtagcatatcccttgtatagtgaacttaacaaaattttccaagtgatgtattctaggattcagagctaggatataaggcagacatattcttgcagtacagtagtgtttttatcatcctttttgcttcataattgactgcacctgaggtagacaaatatgtgcagtattctgtaaatcagaatcaaatttactggggtctttggccttggattgtgtttggagagtatcttgtggacgactgagaattttttcttcttgattatcaaataataataataataatt

SEQ ID NO: 8653 - DNA, 2239 bp, Glycine max
ctcgagccgtttcagtagttgggccgatccaacagccactagttgaaacgttcagtgggtcccaactaccgactcatttgtgcttcctctgttggcatctcctccgcacacacacatgttttgttgtttatcgtcgtcgctgactcgctcactgccactcactcactcactcacgcgccacgccgaacgagtcactgactcagattgatccctcacaccctccctgactcactcgccgccgtggccaaccacaaaccacttcaaatggactcctcctccgacgaggaagacgaccaccgcaacctcgtcgacaacaaccaccgcaagccgccgtcctcccccgctgccgtcgctttccacgttgaggatccctccccgcgcttccgccgcgcgaatttcacgctccagaagaagtacattttcgcaatcctcgctatcctcttcctcctcctcttcttctcaatcaccgatctccacaaactcttctcaacaacctcttccttcagattcgattccctcaccgatcgaatgaaggaatccgattcgccccccttcagcctcttgctgcgccgcccgcaaggcgctcttatctgcgtggaaccacacgctccgaaccaacgcttcggatccgaacctattagaggatctgaaatcttctatcttcaagcagatttccctcaaccgcgagattcagcagattctgttaaatccgcattccacaggaaacaacgcaatcgagcccgagttcgatttaaacgctactctaaacggcgtcgtttacgataggtgtagaacggtggatcagaacttgtcgcagaggaaaaccatcgagtggaacccaaaggatggtaaattcttgctcgctatatgcgtttcggggcaaatgtcgaaccatttgatttgtctggagaaacacatattcttcgctgcgttgttaaatagggttttggtgattcctagctccaaggtggattaccagtacgatagggttgtggacattgatcacattaacaagtgcttggggaagaaagtggtggtttcgtttgacgtgttttcgaatttgaagaaggggcatttgcacatcgataagttcttgtgctacttttcgcagcctcagccttgttacttggatgatgaacggttgaagaagttgggtgcgttgggtttgactatgagtaagcctgaggctgtttgggatgaggatacccggaagccgaagaagaagacggtgcaggatgtgctggggaagtttagctttgatgatgatgttatggcgattggggatgtgttctatgctgaagtcgaacgagaatgggtgatgcaaccgggtggaccaattgctcacaaatgcaagactctcattgaacctaatcggcttattttgctcactgctcagcggtttattcagacattcctgggaaggaacttcgttgcattgcactttcggagacatgggtttttgaaattctgtaatgctaagaagccaagttgcttttaccccattcctcaagctgcagattgcatcttgagggtcgttgagagggccgatgcacctatcatctatctttctacggatgcagcagaaagtgaaaccggtctgcttcagtcactagttgtgttgaatggcaggcctgttcctcttgtaatacgtccagctcgaaattcagcagaaaaatgggatgctctgttgtacaggcatagaatggatggagattcacaggtggaagccatgttggacaaaagtatatgtgccatgtctagtgtgttcattggagcccctggttccactttcactgaagacatcctgcggttgagaaaggactggggatcagcatccatgtgtgatgagtatctttgccaaggtgaggagccaaacattgtagcggaaaatgaatgacaacaaaaaacggttttctcgagcccatgactctggaccagcacacgtattttcttgtgccatgattggggatttgtcaatgtgagtagtcatgtatgatactagaattagccatgttaatgtaatgtataagttttgcttgttatacatattcttttgtcataatcattataatttgtatttgttgtattatcgacacattgatccagaatttgccccaaagcaattgtggcatttcaacattttatttctcttttctcattgtaaatattactgatacaataatcactagcgactagccgtgtattgaaattgaatggattattgaagttttaacgtgtt

SEQ ID NO: 8654 - DNA, 1450 bp, Glycine max
  misc_feature (1426)..(1431): n is a, c, g, or t
  misc_feature (1441)..(1441): n is a, c, g, or t
  misc_feature (1449)..(1449): n is a, c, g, or t
cccccccatagggcacatcttatccccatcatttttatatccggataggtaacctaagcttttcttccagagactctgaaccatggcttcatgtaccgcacctccctccctcatgctcgtccactctcaagacctttctccctctcttcgctccttctctcacaggcccatttctagaaccaccttctctctctatcctctccttttgaagccctccaaatggctccacatagagcccaaatccaggacttgccatgccctcgtcgccgctttgtctgcagaggtccaagtgcccgaaactttcgacgacacggaggaggacgacggtgctgatggctccaccgccaccaacaccgtccccaccaccaagcctaagaaaggcaaggccgcattgcctctcaagagggacaggacgagatctaagaggttcttggaaattcaacaattgagggagcgtaagaaagagtatgacttgaagacagcaatatctttggttaaagaaacagctaaaaccaagtttgtagaaacagtagaagcccatttccgcctcaacattgaccctaaatataacgatcaacaattaagagcaacagtaaatctgcctaagggaaccggaaaacccgttaaagtggctgttcttactcaaggtgaaaaattcgatgaagcaaaaaatgcaggagctgatttggtgggtggagaggatctgatagaacagataaaagcaggattcatggagtttgataaactaattgcttctccagatatgatgcctaaggttgctagcctagggaagattctgggaccaagaggactgatgccaaacccaaaagctggcactgtaacacccaatattccccaggctatagcagaattcaagcagggaaaagttgaatacagggcagacaaaactggaatcgtgcacttaccttttggaaaagctgactttccagaagaggatcttcttgtaaacttgcttgctgcagtgaaatcagtagaggcaaacaaaccttcaggtgctaaaggtgtgtactggaaaagtgctcacatatgctcagccatgggaccttcaatcaggttaaatatcagggagatgcttgattacagacctccatcagaatagaaccctcacatgtaaatgttcgtttggcctcagtcagctatcccgggtgccattgtgagatcttgccaaatatttattcaaagatgttaccaaagttacatacaggggatgggatctctctgttccaaatgtttgcacactgctacattacataatctttgaccccggctgaggattttccttgtattactttgtaactaacaccagagatctaattatattttctttcgtgggaataaattttcatttttacgttttaaaaaaaaaaaaaaaaggttgaacgccccccccggatgtgttcgtagnnnnnncacaattganatggtatnt

SEQ ID NO: 8655 - DNA, 1309 bp, Glycine max
gattcttctcaaagtcatataatcagctacgtaggccccccccccgatataatcctcaggtttccccacgtttcctctgtcacgaggaacagcgcagaacctaaccctcacgaaaacccctttcgattccgataactctcgttgtgccgaaaccctaaccttaaccgggttttctcgttggttgggattgaattggcatcggagggaggcgatcgattggaaaattggtagtagtagtttagcgttgaagaacgatgtctgctgctgtgtgcggaagcaagagatctttcttcgaagagcttcctccttctccgccactctccaagaggctccgttgttcctcttcgccgattcgattccctcctccctctcccgtcgaccaacttcgccctctctttccccacatggacgacttggttcttgagagagctctccaagaatgtggcaatgatatagatgctgccatcaagaggcttaatgagctttgcttgggaactgccgatagaaatgggattgctgaagaattggaggttgtcattaatctggatgcaggtaatttggaaggtgatggaaatgcttctgtttctgaggagcagcctgctttgaacaaccaccttccggcagatggagcagaatggattgatttttttgtcagggaaatgatggttgctactagtgttgaagatgctagagcacgtgctgccagaatgctggaggttctagagaaatcaatcagtgaaagagcaaaggctgaggcaactgatgtgcttcagaaggaaaatttgatgctgaaagagcaaattgaagcgttgattaaggagaaaaattctttcaaaaatgcttttagaatccagcatgaacgatctgctgattatgaggttaagaaccaagagttgcagcatttgaagcaattggtgtctcaataccaggagcagattaaaactcttgaggtgaataactatgctttggcaatgcatttgaagcaggctcaacagagcaacccctttcctgggcgcttcccacctgatgtcttctaatggggtgaatgtgtagaatgtaataataaaggcagcaaacagctggattaattatgtcgtgttgtttttctttcttacaaaggtcaagcgttgttgtagtttgcttttatagcttctgttggtcagagcatggtttctgcttttatagttcaggacttcaggttatatattctatcctatcaacacagtatagtatccgacagtatcagaatatatcgtcactcaattcaattacccgtttggaattttatgatttcgagttatagtccctc

SEQ ID NO: 8656 - DNA, 1828 bp, Glycine max
  misc_feature (1179)..(1180): n is a, c, g, or t
  misc_feature (1796)..(1796): n is a, c, g, or t
tcgagtcagctacgtaggcccccccccgaaccaacgaacacaagggaaaaaaaagtacccactttcccttcttcttcttcttcttcaatttgggttttctcaaaagtgaaaagcgaagtccgtcactgccacaatcaccacttagatcagtgatatacacacccatctcagaaaccccacaagaacaaaaactcagaactcttgagtgatagacttcgaatgaaatcctgtttttcattagtgagattcaattgaagtgaagtgattattcactggaaaacttatttttcatacaactgaagctgttagatttgttttaactacacaagtttgttggatctttgagcatggctgggaatcaagatcagttcgagatcaagtttcggttgactgatggttctgatattggccccaaaagttttcctgcagctactagtattgcaacattaaaagagagtgttcttgctcagtggccaaaagacaaggagaatggcccaaagaccataaaagatgtgaagttaattagcgcaggaaaaattttggagaacaacagaacagttggggaatgccagagcccgttatgtgatacccctgatactgttacgacgatgcatgtggttgtgcaacatcctgctacggagaaagagaagaaagctgccaacaaagcaacacagaacaaatgcatgtgcgttattttatagcatccagattgaatagcagatgccatctgtcttagttggttagggacacttcctttttacgtaacctgcagcgtcaaatatttcaacacacacaaattatttggttgcatgcctgattcgtactacagaaagagtactggactatttactttataaaaatggagtacttgacttggtgaagattgtgaagctagtagttccctgattcctctgcggcgccatatttcttgcgcaatttcataggagatgttcttctgccggtctcaacatgtattaggtgttgcctcatcaggcacttggtatatttgttgattgaaatgaactctactagtttgccatcttacccctcatatatatttttacaattcttctctttcgtgtgcctgatacaacatgcttaattccagacatgtatgtgttgaatatttgaatgtgttttaattttctggttgtttatatggtaccattgctactctcnnaaaaaaaaaaaaaaaaaaaaaaaaaaaaaaaaaaaaaaaaaaaaaaaaaaaaaaaaaaaaaaaaaaaaaaaaaaaaaaaaaaaaaaaaaaaaaaaaaagtttttccccccccccgggggaccccattttttaaaagggccccccccccggggggaacccccctttttttcccctttagggggggtaaatttcaaatttggggaaaacaggggaaaaatttttcccggggaaaaattttttcccctcccaatttcccccaaaaaaaaaacccgaaaacaaaaagggaaaacccgggggggcccaagggggggcctaaccccctttaattgcgttggcccccaggccccttttccagcggaaaaacctttttgcccccttttattaaagaaaccccccacccccggggaaaaggcggttttgcatattggggcctctttcccttttccccccacaaaaatcccgggggcccgggggttttggggtgggggggaggggtataccctcccttcaaagggggaataacgttttctccccaataaccggggaaaacccccagaaaaaaaattgtgggaaaaaggccccccaaaaaagccccgaaaaccttaaaaaggccccngttgtgggggtgttttcccatagggccccacc

SEQ ID NO: 8657 - DNA, 1174 bp, Glycine max
acaaccaaaacgaagggaaaaaaaaagtatccactttcccttcttcttcttccatttgggttttctcaaaagtgaaaagcaaattccgtgacttccacaatcaccactcggatcaaactcttgagtgatagactttgaatgaaatcttgtttttcattaacgagattcaattgaagtgaagtgattattcactggaaaacttatttttcatagtattggaggtacaactgaagctgttagatttgttttaactacacgagttcgttggatatttgagcatggctgggaatcaagatcagtttgagatcaagtttcggttgactgatggttctgatattggccccaaaagttttcctgcagctactagtattgcaacattaaaagagagtgttctcgctcagtggccaaaagacaaggagaatggcccaaagaccataaaagatgtgaagttaattaacgcaggaaaaattttggagaacaacagaacagttggggaatgccagagtccgttatgtgatacccctgatactgttacaacaatgcatgtggttgtgcaacatcctgctacggagaaagagaagaaagcggcaaacaaagcaacacagaacaaatgcatgtgcgttattttatagcatccagattgaatagcagatgtcatctgtcttagttgattagggacagttcattttacataacctgcgtcgtcaaatatttcaacatacacaaattatttggttgcatgccccattcatactacagtcaaggagtactggactattttctttataaaaatggagtacttgacttggtgaagattgtgaagcttgtagttccctgattcctctgcggcactaaatttcttgcacaatttcataggagatgttcttcttctggtttcaacatgtattaggtgttgcctcatcagacacttggtataattgttgattgaaatgaactctactagtttgccatcttaccccctcatatattttacaattcttctctttcgtgtatctgattcaacatacttaatccagacatgtatgcgttgagtatttgaatgtgtttcaattttctggttgtttatatggtaccggtgctacccactcttgtatagcagctatggcaatagtgatttaacaacatctctcccaaaatggagatttgatgcttg

SEQ ID NO: 8658 - DNA, 1445 bp, Glycine max
tcgattgggtaccgggccccacctcgatcagctacgtaggcccccccccccaaatacttgctattcgggatcatggcgatgtttgtttgaaacaacagcaacggagaggatgagaagagagtgaagtttgtgaaagagatggcactcgtaacaacaaacccaaccatcaatgaggggcctctgttcgccgaagttgacatgggttccgacttcaacgccccaacggttcgagctaccgttgttcaagcctccaccatcttctacgacacaccagccaccttagataaggctgagaggttgttggctgaagctactagctatgggtcccagcttgtggtgtttccagaagcctttgtgggtggctacccgcgtggttcagcttttggtctttcgatcggaaatcgcactgttaagggtagagaggagtttcgcaagtatcattctgcagccattgatgtgcctggtcctgaagttgatagattggcagcaatggcagggaagtataaagtacatttagtgatgggtgtgatagagagggacggctacacactttattgcaccgttctgttctttgattctcagggtcattacctaggaaagcacaggaaaatcatgccaactgcattggagcgggttatctggggatttggggatggatcaaccattccagtgtttgaaactcccgttggaaaaataggtgctgccatttgttgggagaacagaatgccactgttaaggacagcaatgtatgccaaaggtgtggagatatattgtgctccaacagctgattccagggatgtttggcaagcatcaatgacccatattgcacttgaaggtggatgttttgttttgtcagcaaaccagttctgtaggagaaaggattatcctccccctccagagtatgtttttgctggcacagaagaggacctgacaccggattccgttgtatgcgctgggggtagtgtcattatatcaccatctggggctgttctggctggaccaaattatgatggggaagccctaatctcagcagaccttgatcttggagaaattgcaagagctaagtttgattttgatgtggttggacactattcaaggcctgaagtgcttagcttaattgtaaaggaccatccaacgaaccccgttacttttacatcaacatcgacaaaaattgaagacaagaccaagtagtttcttcctttcatggtcaacaacttccaaacctctagttctggaccttgtccatatacccttatttgaccccttgtatgttaactcctatctccatatatgaaaggttatttgggcttaccttatacaataagcggttgcattttggtttggtttatatgaggccacattaaaattacattggaaaacatgtctgctatttttcccataatttcataagctaacaattatgcttatgaagtaagcttgcacaa

SEQ ID NO: 8659 - DNA, 1977 bp, Glycine max
attcaacccaacatgcagttcctgttccaaccacaaaccagaccacggattctcacgcgccaagtttggaggtgaagtcaccaccattccttgcaagtaaggaaccgccaggtgctgtaaaaaatcagacttttaactctgatgaagctaaatctgcgagcacaaatcaaactacaaatgctactgcaactgcaactgcaaccaatgtttcagtgagtttccctgttcagaatgttccaaatctgaacacgagttctaattcttcggtgaaggtggatttggtgaagggtactgttgtgtctaatgataattacaccgcttctctggcgaggaaacagaacaatgggaaggatcacgctaaggggaacgatgaatcgatggagtctctgatgaagtgtgatttttttgatggagagtgggttaaggatgatgcatatcctctctataagccagattcttgctctttgattgatgaacagttcaattgtattaggaatggaaggcctgataaggattatcagaaatataagtggaagccaaagggttgcacacttccaaggttggatgcgcatcgaatgctgcaattgttgagagggaaacgactggtttttgttggcgattcgctcaataggaacatgtgggagtctttgatttgcatattgagaaatgctgtgaaaaataaacacaatgtttatgaagtaaatggaagagttaatttcagaggcgaagccgcttattcatttgttttcgaacccccccccatttgttttcgaagattatcacttctccgtggagctttttgtgtctccattcttggttcaagaaggggaaatgactgataagaatgggacaaagaaggaaacacttcgtctcgatttggttggtaaatcttcatctcaatataaagatgcagatattctcgtcttcaacactggccactggtggactcatgataaaacttctaaagggcaggactattatcaagaaggtaaccatgtgtattccgaattaaacgttcttgaggcattccgaagagctttaacaacttggagcaggtgggttgatgccaacataaatccatccaagaccacggtcttcttcagaggctattctgcatcccacttcagtggtggacaatggaattcaggtggtcaatgtgatagtgaaactgatccaattgacaacgagaagtacctaaccgagtatccagataagatgaaggttttggagaaggtgctaaagaatatgaaaacccgtgtgacttaccaaaacatcactagaatgacggatttccggaaggatggtcacccctccatatacaggaagcaaaatctatcaccggaggaacgaaaatcacctttgagattccaagactgcagccattggtgccttccgggtgttcctgatttatggaatgaagttctctatgctgaacttctattgagagagtatcagaatcagcatgagcagaagcataggtaaacacataaactaccaaacttctgcctcacttatggtctatgagttaagctcaaacagaaccagatgctgtgtgttccatttttgttcccacgcatgtccaggatagtgaaagaaagaaaccatacagaaagtgccttctgtatttatttaaaggttcataaaattaagtgaaccaatatatactgaattaaaagatgtgagtaccttgatactgtgcaataaatttgttcatatggaagacataaattggtgaggataggagagaatacgagggtggtgttatttgttattgtaaatcatcccttaccttgcatcttcattttctttctagcctgaaaggctgattcttgttgtaaatctatagtcaattagatttttatttattataatcaaattattgggatgaactgttccagcacccttttgttaatttatcagattgtcggttttcttgttaatttatgcgattgcacagtgaactttttcttcctagtc

SEQ ID NO: 8660 - DNA, 1378 bp, Glycine max
gttttcacttggaaggttgggttgggtctctagtttccaccgtaaccttaaacactgctgaaaatttctatggggaagttgactcttccgtttgtgggaatgattatggcagagtttgctcaggttgggttaatcatactgagcaaacaagtcatggcacaaggaatgaccaatttcatcttcatcttctattccaattcaatcggtgctctcctccttcttcccatttccttacttatacacagatttgaacgtcctccaatcaccttttccaccctttgtggattcttcttacttgcactactcggttatttggcgcaggcttttgggtatgctgggatttactacggctcagctacactcagcacgtccatactcaacctcgttcctggttttactttcatacttgctgttctttttagaatggaaaaattagactggagaaaattaagtagccttgctaaattgttaggaacaatagtatcaattgctggtgcatttattgtgactttgtacaagggccctgcacttttgatgggagtgtcatccgcaaacacatctcagcagccacttttatcagaagattctaattggatactcgcaggtttatttcttgcggccgattgtgtaatggcttcagcatatattattgtacaggcttctattcttaagaaatatccagcagagttgattgttgtattcttttattgtttctttgtggccattcaatctgctgtgacctgtttggttgtggaaagagacatcagtgcttggagcttggaacctaagctaaggttgcttgcagttttatactcgggagtctttggctctgcatttcaagttggtattatttgttggtgtttgcaccagacaggaccggtttttgtttccatgttcaagcccttaggaatactcatatcagtggttttaggtgttctcttcctcggggatgcattctatcttggaagtctgataggtgctaccgtgattgttgttgggttttattctgtattatgggggaaagccaaagatattgaagatgctgggctcagcttggagtcaaagggcaaacaggccccacttttggaggaaaacagccatgaagacatacaagggcattagttcattttaaaaggatgctacaatattgtcagcaaacaggcaatttcaattgtttctcagaataaaggagtcttctctgactctcagaagtatattatttctctccgtttggagtgtatagatgacattgaccttgtcagttgtaagttgtaactgtaagaattatttactattttatgttgtttagactacatgaaatactcttatttataatgaatgaggtttacaaaataagaaaataaaaaaaaaaaaaaaa

SEQ ID NO: 8661 - DNA, 1592 bp, Glycine max
tcgagtcagctaagtaggcccccccccccctactgaaaaaaagtgagaaacacgaacctcaaacctcagacagaaccaaaaacacacttcttctcttcttccattctctaacgctatcagcatcaacacagtgtcacatccattaacgtgctatggtgtttagttaggaaacaccggtggtaaaattgtacgaagcagaaagaacatggctccgtctagcaaggctgagaaaaaggctgccgtggatgcagctgcatggatgttcaatgttgttacatctgttggaatcatcattgtaaacaaagctttgatggcctcttatggcttcagttttgccacaacattaacaggcatgcactttgctaccacaactttgatgacagttgtactaaggatgctgggatatgtccagccttctcatttacccttgccagatcttctaaaatttgttctctttgctaacttctctattgttggaatgaatgttagtctaatgtggaactcagttggattctatcaaattgcgaagttaagtatgatccctgtatcatgcctattggaagttgttctcgacaagattcggtattcaagagacacaaaactgagcataggtgttgttcttatgggtgttggtgtttgcactgttactgatgtgagcgttaacggaagaggattcattgctgcctttatagctgtatggagcacttctatgcaacaatattatgttcatttccttcaacggaagtattctctaagttctttcaacctgttgggacatacagcacctgcacaggctgcatcactactgttattaggaccttttctagattattggttgacaaacaaaagagttgacagatatgactacaacactgcctcgttgattttcatattcctgtcatgcactattgcaattggcaccaacctaagccaatttatctgcattggcagattcactgctgtttcttttcaagtactgggacatatgaagacaatacttgttttaatcatgggattctttttctttggaaaagagggtctcaatctccaagtggtttttggaatgatcatagcagtggccggaatgatttggtatggcaatgcctcatccaagcctggtggaaaagagcgccggagtcacactcttcctacaaacaaaacagaaacaagatagtttaacagaattcacaaattttgttgttttcaagtgtaacggtattatttgccaaagttgagcatacgaagaatcgaagatggctgattctaggaaagtgttctaaattatttgaaattaaacctcattggttcctaattattttcaacctcattttgtacttaatacagtttgatctctttggattcttagggacattggatatttccttataggtctaggttcccagcaaaaaatttcatctttggaatgattagatgaatatatttatattctttcttgactcattatttgtaaatgtgcagttgagattgtttcagtgattcatgtgtgaagcacattaaggcatgtgatggcatggcttaggattctcatcaaaaaaaaaaaaaaaaaagggtatatgtgttgtttaaccctc

SEQ ID NO: 8662 - DNA, 1065 bp, Glycine max
acacgtgtggaacggacagaaacagataagggcgttctctttaccagctaacatttccagtgttcccatgtctcctgcccactgaagtcgaacccctaatggcttctcaagttcttcttcaacaggcactgtttgcccccaagctaagtttcccttcttcttctcgtaacgtcgcgttaatttctagggttccttccaccccaatttcatggcgttgcactcctctcattgctaagcctagtttcgctgtgagagctgactccaacgtcgaaggcgctggtgaagccaccgaggatgttccttcgtataatgttgatgaagtttcggaaggcgaaggagaacaagtttcggattctgaagctccaaaatctcccagaaaaccccgagtcaagctcggagacgtcatggggatactgaatcagagggcaattgaggcatccgagaagcaaaggccaactccagacattaggactggggatattgtcgaaatcaaattggaggttcctgagaacaagcgtaggttgtccatttacaaagggattgtcatctcaaagcaaaatgctggtattcacacaactattcgaatccgaagaatcattgctggcacaggggttgagatagtcttcccagtttactcaccaaacatcaaagaaatcagagtggtaagccaccgtaaggtcaggagagcaagattgtactatctgagagacaagcttccgagattctccactttcaagtgatactcgaatacccacttttcctcgcgttcttctttgaactagtctgctgaaccaggataagtgctgcgaggctttaattttttaatttcaatttgttctgttgtataatatatcacttttcttccccttagtgtgtcttcccaacaagtgtactgaaccttgatagtattgagaaatttgaagtgtttcttctgcatcaaaaaaaaaaaaaaggtagaaatctaagctatgaagaaaatattactttagtttattaaaatggagattataacagcaaaggtttaaaatctaccgtcataatgtaataatcatgttctggattggg

SEQ ID NO: 8663 - DNA, 1769 bp, Glycine max
gtggaataaagtggcgaacgtggtgagggaactggaggaagggtgcgccacccgcgcggccgggttgaggcaagtggtggatgccatggccgtcgagatgcacgctggtttggcttctgaaggtggctccaagctcaaaatgcttctcacattcgtcgataatctccctaatgggacagagagaggaacatattatgcacttcatcttgggggtacaaattttcgggttttgcgggttcaattaaatggtcaaccatcttcagactttgaacatgaagtagaacgacaacccattccccaacatgttatgactagcacaagcgaggatctctttgattttattgcgtcttcattgaaggaattcattgctaaagaaggagatggttccaatatttcacaggacagaagggagcttggatttacattctcctttcctgtgaaacaaatgtctgtatcttctggcattttaatcaaatggacaaaagggttttccatcgtagatatggtaggaagagatgttgcaacatgtttgcaagaagcattggcacggaaaggcctagatgtgcgggtagctgcattggttaatgacactgttggaacattagcagttggacattatcatgatccagatactgttgcagcaattataattggtactggtacaaatgcctgctatttggaacgagttgatgctattatcaagtgtcaaggccttcttatgacatccggacgaatggttgtcaatatggaatggggaaacttttggtcctctcacttaccaagaacgtcgtatgacattgacttggatgctgagagcccaaatccaaatgatcagggttttgagaaaatgatatcaggaatgtatcttggtgacatcgtgagaagagtcattctcaagatgtcattagagtcggatatgtttggaccaatttctcccaagctttcaatgcctttcataatgaggactcctttgatgtctgccatgcatgaggataattctcctgacttgagagaagtagcaagaatccttaatgacatatttgagattcctgatattcccttgaaggcaagaaaatttgtggtgaaggtgtgtgatgtggtgactcgtagagctgctcgattggcagctgctggtattgttggtatcctgaagaagattggtagggacgggagtggtggcatcacaggtggacggagtagaagtgatatgaaaatgagaagaacagttgtggcaattgaagggggattgtattctaaatatgcattgtttagggagtacttgcgtgaagctctaaatgaaatattgggagaagatattgccaagcacgtaattctaaaggtcaccgaagatggatccggcattggggctgcactgcttgctgcctcttattcatcctaaactgtggatagagggtacacctgctataaaatatatataaattgtttgatatttatatatatatgtgtgtatatatataatatatatataggcacacacacacgtatagccatgtaaatcagaattaattctccatatttaatatctctgtataaaggaaggtttcgtctattctttgaccaagttatcttcactctctatatgattattattatttttttatcgttgtgtgttttatggcttttatctgttgccgggggagaacatttggatgtaatactatactctcgtcctaggactaggagtactatcttgagattgaaattgcttatacgtcttgttttcttatcaataaattatttagtccgca

SEQ ID NO: 8664 - DNA, 1997 bp, Glycine max
tcgagtcagctacgtaggcccccccccgagcatcgcattgcttttgccagcacacagttgcatccttcatccaactccaaaataaaatcgacacaaacacaacacaacagatcgaatgtataatgttgcgtaaggaactataaaatctctcatttctgttctcttcacgcacaccaacaaaacctctctctctcatcggaatctcccaaaagaatggacgacaaaacgcagcagtccgagagtaagcaaaacgacaacgacgaggaagttgcgccaaaacgacaagaccctaacccgtcgtctggcgggtggggcttttcgccgctctcgtttctctccgatcttcagaaggccgccgctgttgccgccgaagagatctctcgcaatgctgctgtagttgcagagactgcatcaaagagcattgcagagttgcaaaacgaagatgaagattcagaaaaagagtatgaaggagatgaaggatctgcagctgagaaggaaagtgacgatgagggttccaaactgcgtaaatctgctctggaaagattggagaaagctagtgaagagtcacttcttagccagggtttgaaggtttttgataactctgtggagacttttgcttcgggggcatggagtgctttaggaaatgcatggagagggggcactgattttgttcagcggctcgagaattctgcaacaaatctttcaggatctccaaagcatgatgggccaggagctgcaggtgctaatgcatcttctctattagagacaggaaaagcttttactgcaaagggaatgcaagtgcttgaatatgttggtaaggagacaatggacttattaatcagtgaaactggaattgaagttgagaaagataaaaaagaaggtgaagaagaaaatgatgaggatcaattatcagaggaagtgacttttgatcgatgcttttacatttatggaggtccagaacaattggaggaactggaggctttgtctagtcattatgcattgttatttaaccgaagaaaagcaaagctatcagctgagcaaaagtctgtatatgatgggaagcttaaagaggtccaacaagtatttaatttgagtactgatattggtagaagcaatgctgattcaaacaagggaaagacaataaagaaaggaaatgagggaagcagtgatgagatgaagaatttacacgattctagtgttggcaaggctgctgaaatggccgcaggtttcactaatgccttggctggactggctgctaatgatatacatcagagaactactgcaagattggaatcgcttcattctgagggagttcatagactatctgaaatgtgctgttttgtggtgtctcaactgctagtgcttggcaaatccatcatttctcgtgccaacaacactgaggatgaagctgatgatgataaggcaaacatcgagtggcctgaagacgtttctgcaaaagctaatatcataagaataaatgcccaaaaaatgataggatatgtggaagccgtttccaacagttttattacaggcatatctgatgtaactgaggcctatcaagctgccattaaagctgttactgctgagtctcattcagttgttacccagaaatcagttcaggaaaaagccactgccttctctgagcaccttcgagctgaacaaaccacagcggtttgtaaaatccaggacgggatgcaatttttagctcacgttctcatttcaacctctatgaatgctgcttgaacaccaatattcctatttgtaaatagtcacacagtttaattagaaaagtgataccactcaactttgcttagtttatttcgaccgtgcagtgatgattgaacgttactcggtcttagtagtgtctgaactggggcaaatttgtcctgttaaattgattcatgcagcttgttttattcttttattcctcaaactgtagaaactgtcacattttcgtcaaatcaaatatcacttaacgcataaaaaaaaaaaaaaaa

SEQ ID NO: 8665 - DNA, 2411 bp, Glycine max
tacccctggactatcccgaccattcttgagcataaaactcatttttattttaaaagatactggagtatatgtcaatgaatctatatcaactaagtaaaaaaaaagacgaaaaagaaaagtttgtaagttagtttcagtagtaggaattattttgtattgttttgttaatcacgcatatgagaattccttgctcaaaaataaaatattcatttgtacgtttatcataaaaaaaattctatgtgtttcacatatatatttcaaaacttgtgacttgtaattatgataagaaatttttgaaaataaaaagccaaattccaatttagttgtgaaagaataaactgaatataaactgaataaagcacataagtaacgacttaaagatagagagggagggtatgggaaaaaattagaaagttaaacaggccttttggggatagagggacttgaaccctcacgatttcttaagtcgacggattttcctcttactataaatttcattgttgtcggtattgacatgtagaataggactctatctttattctcgtctgatggatcagttcttcaagggatctatcagattatgatggagtgaataatttgatcaatgaatattccatcttttcttcaacttggaattgatttgattcacatctttcatttgtgaatatttttatcacaaatggatcttcattaatcaattgaaatactatttcagtatatatatgtttatctttgatccattcctggaattttgacggaaggattctattattttcctaatgcaaaaaggaaaaatcgtcaactccttttgttagaacagcttccattgagtctctgcacctatcccttttttattatcactttatgtacttttctttgttttcggaaaacaggatttggctcaggattgccctttgtgaattccagggtttctctgaatttgaaagttctcacttggtaagtttccataccaagactcaatccaattaagtccgtagcgtctaccaatttcgccatatccccctctttcatctatactcgataccattatttgcttgaattagaaatgattctattatctatctattcacaattcaatatacacagatatataccacatatctatttcgattctatgcccctacttctattattttttcattaaattttgaatactcgaatggtcgattcttttttttttttcatcttagttttttatcttctctttccgactgaaaacttgggagtcttttattatgatctaggttgggcttttctctttctttcatttttttcttttttccttaaagcaaacagatacagactatctataacaaaacaaaaaaatgaaaattttcatttttttgtttttgttgaaataaacaatccatttattcatatagaattgatagaactaaaacgaatcgaatggctataagtaaccattcttttaatgtagaattagacattaatttagaaatatgaaattcctaattattattattagttactttactaaaatttacaataataatatttttgaaataatcaaatagatatctatttgataaatcgatcgaaatttattatattaatatgaattattaatccctattttgtactttatgttatgcactaaaatatcaaaaaaataatataaataagaaatattggattggatattctatattttctatgtttgtattaatttgaattatgttataaataactaccaatttataattaagatcccttttattaaattcctatgcatacgcatattttggttatgttagcccgcttagctcagaggttagagcatcgcatttgtaatgcgatggtcatcggttcgaatccgatagccggcttttctcaatttgttttcaattttttacataattgagaatatcttttttataaataaaaaaattgggagaattcgatcgttgtggaacaaatcaagaaaagaacctacttcttttctttttttttctatacaatagaataaagttcggatattgatagaattcgtctaattcttctttgtagtataatactttagtagattttgcttcatttataatagaatatttttcatttagtttagttttaattttgatttataagattttccattaaaaaaggagtctttatgtcacgttacagaggacctcgtttcaaaaaaatacgtcgtctggggtctttaccaggactaactagtaaaaggccaacagtcaaaagcgaacttagaaatcaatcgggcttcagtaaaaaatcttaatatcggattcggttaaaaggaaaaccaaaaatggggtttcattaagggcttaccggacggccattggttaaataccgtcgtattggcggaaaagcttaaggatcaactggtcaggttttattacaactac

SEQ ID NO: 8666 - DNA, 1465 bp, Glycine max
catcaccaacaacaacctttcacttcaaaacttgtttaccctttgttctctcctcttccagacaccaacatggcttcaatgaccatgatatacaccttactctttctttctttcactttgtcatatgctattaagacctccaccatcatcaactacaccgacaatgaggtcatggccatgtacgaggagtggttggtgaagcaccaaaaggtgtacaatgagttgggaaagaaggacaagagattccaagttttcaaggacaacttagggttcatacaagagcacaacaacaatctaaacaacacttacaaacttgggttgaacaagtttgctgacatgaccaatgaggaataccgtgccatgtatttgggcaccaagagtaatgccaagcgcagactcatgaaaaccaagagcaccggtcaccgctacgcgttcagcgcccgtgaccggttgccggtgcatgtggactggaggatgaaaggtgcagttgctcccatcaaagatcagggaagttgtggaagttgttgggcgttctcaacggtggccacagtggaagcgataaacaagatagtgacagggaagtttgtgtccttatctgaacaagaacttgtggactgtgacagagcctacaatgaaggatgcaatggtggccttatggactatgcattcgaattcatcattcaaaatggtggcattgatactgacaaagattacccataccggggctttgatggcatctgtgatccaactaagaaaaatgctaaggtagtgaatattgatgggtacgaggatgttccaccatatgatgagaatgccttaaagaaagctgtggctcatcaacctgtaagcgttgctattgaagcctctggcagggctttgcaactttatcaatcgggtgtgtttacttggtaaatgtgggacaagtttagaccatggtgtagtggttgttggatatggctctgaaaatggtgtggattactggctggtgaggaattcatggggcactggatggggtgaggatggctatttcaagatgcagcgcaacgtgagaacctccacgggcaagtgtggaattacaatggaggcctcctaccctgtgaagaatggtctaaactctgcagttcctaattcagtttatgaaagcactgaggtgtatgttagcagtgcttgatataaccttcatcgttatttatgacctttgaatttggaaagaggaacaagtgctgaagttgcaagaaagtgatgtttctgttatatcttagatgcttctattgaatgtgtgctgggctattcttgtacataggtttcttcaggttaaaagtgaacctgattatcaatcaatttgtaccggttttcactcattgttattccatttgaatgttttatctgaaatccttaatgatatcaattcgctagttatatttctgatatggatattgaatgtttgtcaaaaaaaaaaaaaaaa

SEQ ID NO: 8667 - DNA, 1511 bp, Glycine max
tcgagtcagctacgtaggcccccccccccgaccaccaacaacaacctttcaaaccctccaaccttagtttcaattctaaacttgttcaccctttattctctcctcttccaaacatcaaccatggcttcaataataaccttggtgacatccaccttgctctttctttctttcactttgtcatgtgctattgacacctccaccatcaccaactacaccgacaatgaggtcatgaccatgtacgaggagtggttggtgaagcaccaaaaggtgtacaatgggttgagagagaaggacaagaggttccaagttttcaaagacaacttggggttcatacaagagcacaacaacaaccagaacaacacttacaaacttgggttgaaccagtttgctgacatgacaaatgaggaataccgtgtcatgtattttggcaccaagagtgatgccaaacgcaggctcatgaaaaccaagagcaccggtcaccgctacgcgtacagtgccggtgaccggttgccggtgcacgtggattggagggtgaagggtgcagttgctccaatcaaagatcagggaagttgtggaagttgttgggcgttctcaacggtggccacagtggaagcaataaacaagatagtgacagggaagtttgtgtccttatctgaacaagaacttgtggactgtgacagagcctacaatcaaggatgcaatggtggccttatggactatgcattcgaattcatcattcaaaatggtggcattgacacagacaaagattacccataccgtggctttgatggcatctgtgatccaactaagaaaaatgcaaaggcggtgaacattgatgggttcgaggatgttccaccgtatgatgagaatgccttgaagaaagctgtcgctcgtcaacccgtaagcattgctattgaagcctctggcagagctttgcaactttatcaatcgggtgtatttactggtgaatgtgggacaagtttagaccatggtgtggttgttgttggatatggctctgaaaatggtgtggattactggctggtgaggaattcatggggcactggatggggtgaggatggctatttcaagatgcaacgcaatgtgagaacccccacgggcaagtgtggaattacaatggaggcctcctacccagtgaagaatggtttaatctctgctaattcagtttatgaaagcaatgaggtgtatgttagcagtgcttgatataacaaccatcatcgttatttatgatctttggaattgggaagaggaacaagtgctcaagttgcaaatgtttctgctatctttgatgcttctattgaatatgtctgttgggctattcttgtacatatatttcttcaggctaaaaaactgaacctgattatcaatttgtactggttttcactcattgttattccatttgaatgttttatctgagaccctcgatgataattaaaattagaagatccatgaaattcgctagttatatttctgaaaaaaaaaaatattatttt

SEQ ID NO: 8668 - DNA, 1360 bp, Glycine max
  misc_feature (1269)..(1271): n is a, c, g, or t
  misc_feature (1275)..(1275): n is a, c, g, or t
  misc_feature (1277)..(1277): n is a, c, g, or t
  misc_feature (1279)..(1280): n is a, c, g, or t
  misc_feature (1283)..(1284): n is a, c, g, or t
  misc_feature (1286)..(1287): n is a, c, g, or t
  misc_feature (1290)..(1292): n is a, c, g, or t
  misc_feature (1295)..(1297): n is a, c, g, or t
  misc_feature (1300)..(1300): n is a, c, g, or t
  misc_feature (1302)..(1302): n is a, c, g, or t
  misc_feature (1304)..(1306): n is a, c, g, or t
  misc_feature (1308)..(1308): n is a, c, g, or t
  misc_feature (1311)..(1317): n is a, c, g, or t
  misc_feature (1322)..(1324): n is a, c, g, or t
  misc_feature (1326)..(1326): n is a, c, g, or t
  misc_feature (1328)..(1328): n is a, c, g, or t
  misc_feature (1330)..(1330): n is a, c, g, or t
  misc_feature (1333)..(1333): n is a, c, g, or t
  misc_feature (1341)..(1341): n is a, c, g, or t
  misc_feature (1344)..(1344): n is a, c, g, or t
  misc_feature (1353)..(1353): n is a, c, g, or t
  misc_feature (1355)..(1355): n is a, c, g, or t
  misc_feature (1357)..(1359): n is a, c, g, or t
tcgagtagctacgtaggccccccccccaaacaaaataaaatacccttttttcttcttcttctctctcttcaacgctcgcttagtacagcggaataacgaagcctcctcgttcttcttcttccgccctttctctctctagaaccgtacggtcgtttctttctctctcctcaaccggagacagcgtcgccttcttttctgaatctcgcggtgttgttagttctgcggcggttgtagttccggcggcgatgggacagcaatcgttgatctacagcttcgtcgctcgcggcaccgtgatcctagcggagtacaccgagttcaccggaaacttcaccagcgtggcggcgcagtgcctccagaaactcccttcctccaacaacaagttcacttacaactgcgatggccacaccttcaactacctcgttgataacggattcacttactgtgtggttgctgttgagtctgctggacggcagattccaattgctttcctcgaacgaatcaaggaggattttaccaagaagtatgctggaggaaaagctgcaacagcggctgctcatagcctcaacagagagtttggacctaagttgaaggaggagatgcagtactgtgttgatcacccagaggaaattagcaagcttgctaaagtgaaagctcaggtttcagaagtcaaaggagttatgatggaaaatattgagaaggttcttgaccgtggggagaaaattgagcttttggtggataaaacagagaaccttcgctctcaggctcaagatttcaggcagcagggaaccaagattaggagaaagatgtggttccaaaacatgaagataaagctaattgttctgggtatcataattgccttgattctcattattgttctttccgtttgtggtggcttcaactgtggtaaatgagtcttcccacatcctggcttcaactgtggtatttgtctcctcacttgataagattgttgctagcagattgccattgcctctactgtcaacatagtgcttttgactttttgggatttacattcttccgacttctccgatgatgaatattatatggcattgcttgtatagtgtgaattatttagcctttatcatcttgtctccatagcataatgctaatctgtcattctctatagtttaggtgggagtttcagcatttggtgtgaggattatgttttttaattatgcttacatattaagaaatcaaccattacgtagttgagctttttattaccatttttttttatatgactcgccacgnnncctncncnnccnncnnctnnnctnnngtntngnnntnccnnnnnnnccggnnntncncnggncccggggnccncctttttangncnnnc

SEQ ID NO: 8669 - DNA, 1582 bp, Glycine max
aaatgggatgttcttctagaatgacaaaacttttcttccaaaactctccttgcagatttgaaaatgtcacgcagcaaaatttgaaaagcacgaaacgcgacggcacggcgtggcagttccgcaattaacgtataaactcgagggcagttcaacaaactacatcctcttttccgcctgcgcgcgctcgactcacatctaagccaacaaaatcaaataccctttctacttcttcttcaacgctctttagtacagcggaagaacgaagcctcctcgttcttcttcttctgcgctttctctctccctctctagaaccgtaaccgtcgtttctttctttctctctcctcaaccagagataaagagtcaccttcttatttttctgaatctcgcggcgttgttctttctgctgctgcggctgtggttccggcggcgatgggacagcaatcgttgatctacagcttcgtcgctcgaggcaccgttatcctcgcggagtacaccgagttcaccggaaacttcaccggcgtggcggcgcagtgcctccagaaactcccttcctccaacaacaagttcacctacaactgcgatggccacaccttcaactacctcgtcgataacggattcacttactgtgtggttgccgttgagtctgctggacggcagattccaattgctttccttgaacgaatcaaggaggattttaccaagaaatatgctggaggaaaagcagcaacagcggctgctcagagcctcaacagagagtttggacctaagttgaaggagcagatgcagtactgtgttgatcacccagaggaaattagcaagcttgcaaaagtgaaggctcaggtttcagaagtcaaaggagttatgatggaaaatattgagaaggttcttgaccgtggggagaaaattgagcttttggtggataaaacagagaaccttcgctctcaggctcaagatttcaggcagcagggaaccaagattaggagaaagatgtggttccaaaacatgaagataaagctaatcgttctgggtatcataattgccttgattcttattattgttctttccgtttgtggtggcttcaactgtggtaaatgatgagtctttcccacgtcctggcttcaactgtggtatttgtctcctcacttgataagattgttgctagcagattgccattgcctcaactgtcgacgtagtgcttttgacttactttttgggatttacattcttccgtcttctccgatgatagatgttatatggcattgcttgtatagtgtgaattgtttagtctatcatcttgtctcccatagcgtaatgctaatctgtcattctctatagtttaggtgggagtttcagcatatggtttgaggattatgttttttaagtatgcttacatattaagaaaccaaccattacgtagttgagcttttttattaccaacttaccatattttttgttggacttgtgataatccgtgcgtttgtgtgtgaacgttttatccatcttcgaggccttgcttatgttctaattctaaacgctagtggtttttgttttaacttggtaattattaaatcattcatttggt

SEQ ID NO: 8670 - DNA, 2062 bp, Glycine max
ccacgccgcccccagcaggccaccgcagggggaacagttttcagtcaccaaacattttttttccatgaactttgcatctttctatcatcacatccatggccacagttgtgaagctccacgttttcccagaaagtttgaaccaacacaaaacgaggttgctcaggagaggctttggctcatgcccttcacctggggtgcttggttttggccataaaaattatgatcagttctctgtgaaagtgtgcagggcttttaggactgaggatggtggggatgtgaaggagaaaaagtttcgaaatttgaagaaaaatgaagagaaaaccaaaagggaaagtgggttttggagttccctcaagtctatcttgctgaggaatttcatggtgggttcaaaatcagatgatgagtatcgccaagctgtggtcaaggtggagggtctcctatcctcgattgccattcaaattggaaggtatattgtgactatgatgagcactggggtcatcctttcaattggatttcagatgtcaggtggagacagtcagatggatgcattaatatggtatagttggctaggaggagtaatcattgggacaatgataggtgctaacatggtgttggaggaacattgtcgcgcaggtccacgtaatgttgtcataacggggagtacaaggggattgggtaaagccttagctcgcgagtttcttctttctggagatcgtgtgattgttacctctcgcagccccgagtctgtgcaagcaactatcaaagagcttgaggaaaatctaaaggaaggcattgccaatgcagttggctcttctctgacaaagctttcacatgcaaaagttgtaggcattgcttgtgatgtttgtgaacctcatgatgtgcagagactggctaacttcgctgtcaaagaacttggtcatattgacatttggataaacaatgccggaacaaataaaggttttagaccattgcttcagtttagtgacgaagatattaaacagattgtctcaacaaatttggttggatctatcctctgcactcgagaagccatgcgtgttatgagaaaccaagccattgcaggtcacatatttaatatggatggtgcgggttctggaggctctagcacacctttgactgctgtatatggttctacaaagtgtggccttaggcaacttcaaggatcactattaaaggagtgcaagcgatccaaagtaggtgtccatactgcatctcctggcatggttcttacagatctgcttttaagtggctcaacggtccaaaacaggcagatgtttaacatcatctgtgagcttcccgaaactgttgctagaacactagttccacggatgcgggttgttaagggaacaggcaaagctatcaattacttgacccctcccagaatcttacttgctttgatcactgcttggttacggcaaggtcgctggtttgatgatcagggaagagcattatatgcagctgaagcagaccgacttcgtaattgggccgaagatcgagcccggttttctttcactgatgcaatggaaatgtacacagagaacacctggttatcagtcttctcactttcagttgtctgtgccttcataattctttccagcacaggcagcaatttgcctggaacatgacgatgtattgctgccaatgcaaaaatgcatttgcttttgtggacaggtaattggtgcctgaaatcatcaagacaatagaatgaatctaaagtctaagttataaacaaagtggatctgtttttttcccaccatgtccacctaaacaattatcatttgacacccttagctcagacatttggctccccatgtactatgtatataggctgccctgcaatcagcattcttcattaagatgcttatagtcatagtatgttactatgtatagccttcattgaattgtagactagtgaaatttcatattttctacccaatatatttatttgaatgtatatttatcagtgtgctaaaatctgaaatttatattggacattggacaccccacaacgcttttattaatgctatatacattttttttggtt

SEQ ID NO: 8671 - DNA, 704 bp, Glycine max
tcgagtcagccgtaggccccccccccgtggttaaatggagagatataaattgaaccaaaacttagagccaagtgtgtgtttcagggaagagcattatatgcagctgaagcagaccgacttcgtaattgggctgaagatcgagcccgattttctttcaccgatgcaatggaaatgtacacagagaacacctggttatctgtcttctcactttcagttgtctgtgccttcataattctttccagcacaggcagcaatttgcctggaacatgatgatgtcttgctgccaatgcaaaagtgcatttgcttttgtggacagataagtggtgcctgaaatcatcatcaagacaatagaatgaatctaaagtctaaattataaacaaagtggatctgtttttttcccaccatgtccacctaaacaattatcatttgacacacttagttgtctgtgacctttagctcagacatttggctccccatgtactatataggcagccctgcaatcagcattcttcattgagatgcttatagtcatagtatgttactatgtatagcctttcattaaattgtagactagtgaaatctcatattttctacccaatatatttatttgaatgtatatttatcagtgtgctaaaatctgaaatttatattggtcattggacaacacttttggataatgttatatacagttttttgttactgca

SEQ ID NO: 8672 - DNA, 1094 bp, Glycine max
gaagagctatgaccgtccattccccccgtccgtaagccttcggaatttcggcttcgagggtccacaatattttaaataatggatgggtgccgggttctggggggcggcagagcggctcgagatccattacacagctatagctcacctttaactgccgtatatggttctacaaagtgtggccttaggcaacttcaaggatcactattaaaggagtgcaagcgatccaaagtaggtgtccatactgcatctcctggcatggctcttacagatctgcttttaagtggctcaacggtccaaaacaggcagatgcttaacatcatctgtgagcttcccgaaactgttgctagaacactagttccacgcatgcgggttgttaagggaacaggcaaagctatcaattacttgacccctcccagaatcttacttgctttggtcactgcttggttacggcgaggtcgctggtttgatgatcagggaagagcattatatgcagctgaagcagaccgacttcgtaattgggctgaagatcgagcccgattttctttcaccgatgcaatggaaatgtacacagagaacacctggttatctgtcttctcactttcagttgtctgtgccttcataattctttccagcacaggcagcaatttgcctggaacatgatgtcttgctgccaatgcaaaagtgcatttgcttttgtggacaaataattggtgcctgaaatcatcatcaagacaatagaatgaatctaaagtctaaaaaattataaacaaagtggatctgtttttttcccaccatgtccacctaaacaattatcatttgacacacttagttgtctgtgacctttagctcagacatttggctcccgatgtactatataggcagccctgcaatcagcattcttcattgagatgcttatagtcatagtatgttactatgtatagcctttcattaaattgtagactagtgaaatctcatattttctacccaatatatttatttgaatgtatatttatcagtgtgctaaaatctgaaatttatattggtcattggcccacccttttggataatgttatacacagttttttgttcctgca

SEQ ID NO: 8673 - DNA, 811 bp, Glycine max
tctattacggctgcgagtcgccgactggtgggcaccgatcgaagtagcagcacacagaaaatgggcactcgagaggtgtacgaagagaaactaaggaccggaaatctccaccacgatcccaccatcaaccctggcctcggttccgctcgatgccctcgctgtctctctctcctcaaccctaatttcgaaagaggcgagtggaccatcactcccgtcttgcacgacgccactgccgtcgctgggtcggggattggtggtatgcttggttttgttcatggtttcaatacaggtttacctcttcttcaaaatggtctgaagggaccgaagtggcttccttttgttgttgggattcctccattgttgatattctccggcctaagtgcagcatttggaggttatgtgcttccaaagttcactcaacttaccgtaacatcctactatgcctcctcgagtgcctcacattatggaatctcgcttctcacccgacatattgaagagaattacagttccaaaactcggcagcacctcaagaggctctgataattcctttcgggtgtactgacaaggaaaatacattaccttctggcaattttgtttacattaccttcctgtggatggtttggagtgttaaaatttcatttataatattgttactccatacggaaatgcttataatgtgaataatgcctatttatattttactattaagctgtgataagctcatttattgaagtgtaatgtgtagtgttttaggggaagcgactaagaaagaaaactagcaaaaattcaagtcaatcttatttttatggcc

SEQ ID NO: 8674 - DNA, 1499 bp, Glycine max
cggacgcgtgggaaacactaggcgcattgcgcaccctctccgctcccataactcctccacgaagacccccccagcccgtgttaagtgtgaatccctttccctctctactcttcactttccatttccatttttttctggttttctttctccatggcctccgccgccgccgtcgccgccgaagacgacgctgtcaacggcttcactcggtcggagatgtactcggaaaacctcgccggcactgtcgacgcctacgaccgacacgtgttcctctgctacaagagctacgtgtcctggccggcacgcatcgaggcatccgacgccgatcccttccccaagcgcgtcgccgccaccttcaaagcccgcaagaacgacttgcccctcaagacgaaaatcacggtgtgcgaggcgcgcgaggaggctggcttcgccgacggtgacgtgttgattttccccgacatgatcaaatacaggggtttggaggaatcaaatgttgatggcttttttgaagatgttttggtgaatggtaaaccatggactgctggagtcccggaggtgtttagtggttcacatgtgtatgtatgtgctcatggaagtcgtgacgtgagatgtggtgtttgtgggccagttctcatcaagaagctgcatgaggaaattgagcttcgaggtttgaaggatcagatatctgttactgcttgttctcatattggtgggcataagtatgctgggaatgtaatcatatacagcccaagagcagatggaaaaattatgggtcactggtatggctatgttactcctaatgatgttcctgatttgttggaccaacatattgcaaagggagaggtcatccaacgacttttgaggggccaaatggggccatctgttgcagatggcaaggaagcagatgaccagaaagttgctaatggggaggagactggcaaggtcaagaaaaacaatcacgttgaaagcgacaatctgagcagcaaagaaaacgtgggtggttgttgccagggtgttaatggagtttcttgttgcagaagtgcaagtcttgagcaaaacaaggagattgaagaaacacctgaaacacataagaaggggagcaaaatctgttcgaattggcctcaactgcagcagcgtgatattcgcacagctgttggtgtgcttggagctgtagcagttgttgttgtggcttacaaactgtacagaagggcagcgtaggttactctctaaaccatgttttttaggttgcttggaagtttattacccaatatttttttttgtcgaggttcaataaatttaagaaacaatcacgaaaactactattaccaagtcatacatagacacttccgcatgttgcatggaaggatagttaaagtctagcaacagatgtagtgatgaaaactttatcatcttttttgaagctcacagaattatgattatgctgctgaatgtttaataaaaaaaaaaaaaaaaaattaaaaaaaaaaaaaaaaaaaaaaaat

SEQ ID NO: 8675 - DNA, 1872 bp, Glycine max
tcagctacgtaggcccccccccccccccaaatttatgtgactccggtttgctgcgtaggggaatggttcctccctcagttgcttccttcctcttgtgtccacccagttccccctttcattttccattcaataattcaaacaccagttaatggctacccttctattccaccacaattcgcctcagatattctcttcctccttcttcttctcacagcattaaacgccgtcgttttcatgactccataattcaccggaagcagaacaacaacaagaagcagcagcagcagcgcgagttcacatgggattgggaacaaccgcgagaagcagaagaagaatcgtcatcgaagaaggttctagaacaagaacacacaacaacaccaacaacgccgatgccgatggagctggagcaggagctaggttcaacaacaatccagcgttccttcgacgcgcgctacacccgccacgcgcgcgactcgctcggcgaattgcctgacagcttcaccatcaccgacccctccatccccggccaccccatcgtcttcgccagcccgggcttcctcaagctcacgggctactccctccgcgaagtcctgggccggcccgcagccatcttccagggcccacgaacatcccgaaaatccgtaatcgaaattcgcgaggccgttagagaggagcgaaacgcgcaggtcgttttactcaactaccgcagagacggtacgccgttttggatgctttttcgtgtttcccctgttttcagcagcgacggtggcgccgtcgtgcactttgttgccgtacaggtaccgcttcagaaaaaagaagggtccggagtgagggatttcgggttcgggtgctgtcggaaggaagtgtgcgtggattcgttggcggagattgatcgcgtttgttcattggagcaagtgctcgaacctgatgtcagagctttgtgggatgcagaagtggagagagaagagccgtgtgaggcgagtgatgatgagaagcgaagtgctgttactgccatggacagtatattttctgtgctaacccattacagtgaggccacagggagattggtgtgtagaaagaggtccagcattcctgacgtgggtcttttaagcacatccttgattatttctcttggtagaatcaaacaaagctttgtattaactaatccgcatttaccagacatgcctattgtttatgctagtgacgccttcttgaaattgacaggttatgcaaaaaatgaagttttgggccacaactgtagatttttaggtggaacagataccgatacctcgactttacatctgataagggaaagcattaaaacagaacaaccatgcacagtacgtattttgaattacaggaaggacaaaagctcattttggaattttcttcatatctcacccgttcgtgatgcttctggcaaggttgcatactttgtgggagttcaaatagaagacaacaataaaaacgatgatagccattgtttgagtcctgagaagagacaacttagtgtggttggtgtagtcaaggttgcagtgaggagtttatcaatgactgcgggatcttctgagtcgtagcaaaaggatcatgtgagtttggaacaaataatatttgcctacttcccagaaatattaatccattcgaaaaaataatcaatctcaattggtgattgttgagatgatagaaaggtaaaagaattaatttgtgaagaagaaaaaaaaagagagtccatactgtcaattgtaagaaaacattctctgttggacgtgtataaataaaatgtattatatttcctaactgcatttattttccgtaatgtagcaataaaagttgacttgtactattttcaaaaaaaaaaaaaaaaaaaaaaaa

SEQ ID NO: 8676 - DNA, 1136 bp, Glycine max
tcgagtcagctacgtaggccccccccccgatgatgagaagcgaagtgctgttactgccatggacagtatattttctgtgctaacccattacagtgaggccacagggagattggtgtgtagaaagaggtccagcattcctgacgtgggtcttttaagcacatccttgattatttctcttggtagaatcaaacaaagctttgtattgtgagttattggaaatgtctagttttgttattactttaccgcaagctttatgcttttttgcagacccttaatttgttgtttgtatgattttgagtttccatgcagaactaatccgcatttaccagacatgcctattgtttatgctagtgacgccttcttgaaattgacaggttatgcaaaaaatgaagttttgggccacaactgtagatttttaggtggaacagataccgatacctcgactttacatctggtgatacacttcttctcgccataggttttttaattttgtcttgtaatttggcaacttagagtcttagactaatgggaatggaccattttgttatgcctttctcttattgcttacgttcagataagggaaagcattaaaacagaacaaccatgcacagtacgtattttgaattacaggaaggacaaaagctcattttggaattttcttcatatctcacccgttcgtgatgcttctggcaaggttgcatactttgtgggagttcaaatagaagacaacaataaaaacgatgatagccattgtttgagtcctgagaagagacaacttagtgtggttggtgtagtcaaggttgcagtgaggagtttatcaatgactgcgggatcttctgagtcgtagcaaaaggatcatgtgagtttggaacaaataatatttgcctacttcccagaaatattaatccattcgaaaaaataatcaatctcaattggtgattgttgagatgatagaaaggtaaaagaattaatttgtgaagaagaaaaaaaaagagagtccatactgtcaattgtaagaaaacattctctgttggacgtgtataaataaaatgtattatatttcctaactgcatttattttccgtaatgtagcaataaaagttgacttgtcctaacaaaaaaagatgaaataaaaag

SEQ ID NO: 8677 - DNA, 1826 bp, Glycine max
tttccttccaatttttcaaacaccagtaaatggccacccatcaattccacccccacaattccttcttcttcttctttccacaacactaaacgccgtcgttttcatgactccataattcaccagaagcagaacaagaagcagcagcagcagcagcagcagcgcgagttcacatgggattgggaacaaccgcggcgagaagcagaagaagaatcgtcatcgaagaaggttctataagaacaacacacaccgccaccgccaccaacgccgatgccgatggagctggagctaggttcaacaactatccagcgatccttcaacacgcgctacacgcgccacgcgcgcgactcgctcgacgaattgcctgacagcttcaccatcaccgacccctccatccctggccaccccatcgtcttcgccagcccgggcttcctcaagctcacgggctacgcggcccgtgaagtcctgggccgacccgccgccatcttccagggcccgcgaacttcgagaaaatccgtcattgaaattcgcgaggccgttagagaggagcgaaacgcgcaggtcgttctgctcaactaccgcaaagacggcacgccgttttggatgctttttcgtgtttgccccgttttcagcagcgacggtggcgccgtcgtgcactttgttgccgtacaggtgccgcttcagaaaaaggaagggtctggagtgagggatttcgggttcgggtgctgtcggaaggaagtatgcgccgattcgttggcggagattggtcgcgtttgttcattagagcaagtgctggaacctgacgttagagctttgtgagatgcagaattggagagagaagagccgtgtgaggcaagtgatgaggagaagcgtagtgcagttaatgctatggacaatatattttctgtgctaacccattatagtgaggcgacgggcagattggtgtgtcaaaagagatgcagcattcctgatgtgggtcttttaagcacatccttgattatttctcttggtagaatcaaacaaagctttgtattaactaatccgcgtttatcagacatgcctattgtttatgctagtgatgccttcttgaaattgacaggttatgcaaaaaatgaagttttgggccgcaactgtagatttttaggtggaacagatactgatacctcgacattacatctgataagggagagcattaaaacagaacaaccctgcacagtacgtattttgaattacaggaaggacaaaagctcattttggaattttcttcatatctcacccgttcgtgatgcttctggcaagtccattgttgtgcctgattacaatttcacatgtgaagattcggtcttttgcttacctatttgataccaggatttttccacactctccttttcgttgtggctagaaggatgaaaattccaggttgcatactttgtgggagttcaaatagaagacagcaataaaaacgatgatagccattgtttgagtcctgagaagaggcagcttaatgtggttggtgtagtcaaggttgcagtgaggagtttatcaatgactgtgggatcttccaagtcgtagcaaaaggatcatgtgagtgtgagtttggaacatataatattgcctacttctcagaagtcagaaatattaatccattcggaaaaatgatcaatctcaaccagtgattgttgagatgatagaaaggtaaaagaattaatttgtcaagaaagaaaaagagagtccatattgtcaattgtaagaaagcattctctgttggaagtttataaataaaatgtattatattttccgtaatgtagcaataaaaattgacttgtact

SEQ ID NO: 8678 - DNA, 703 bp, Glycine max
agtgtctatttttgtgatatagtatctctcaagattctgtagcagcgagaagcagagtagcggatatgaagaagcaagcatcaagcactttcctgatgtgggttatggtgatatcgcttcacgcacatctcatcattgcagctgtgtctaagtctaatggcacaatttccgtgtgcgatggctccgtagaggactgcctcaacgtcgtccacttggactcagagcttcttcccaccatctccagctcccacttccgcagaatccttgctggaaaatatgatggagttaccaacgatgcactaattcctgataaacccttcaagggatgtaaaatcggagaagcttatcgtagctgtctggcccaagttgaaggtagagcgagaaactgtgccatctacaagaggggttgctaatgaatatctaaggttgtgatcgcgccgagctatttgcgtgttttaatgcttttaatttgtttcctctctctctccactttgttgctgtgctgtgtctcgattattgggcatgtttccttattgcaagaataatttcatttactgaactggacaaatttcggggaagagattgtgaacatttatatgtatgcttttctgctttctatttattgaagcctgaaatgtaactatgtatcctctcttaataataatggattgttggattcaaaaaaaaaaaaaaaaaaaaaaaa

SEQ ID NO: 8679 - DNA, 1301 bp, Glycine max
atttagtttggtcgaggtgatttctctcactattatcatcaactatcaaattatatttgcagtggagaaggaaagaatatctatctctcattctctcgtgcctcaacgcttttttaactcctttcgcttttccattccaacctctttcacacttcagatctgtttcttcatcggttgttcaagtaaatggcctttgtcaccactgctgaagtgtgtgatgcgaacccacagttaattttgagtggggagcttcgtgcccttcagccagtttttcagatttatggccgtcgacaggttttctctggacctatagttaccttgaaggtgtttgaagacaatgttttggttcgtgagttccttgaagagaaaggcaatggaagagttctagttgttgatggaggcgcgagtttacgctgcgctatattgggtggcaaccctgtggtacaagctcaaaacaatggatgggcaggtattattgtgaatggatgtataagagatgtggatgagatcaatggttgtgatattggagtgagagcccttgcttcccatcccatgaaagccaataagaaaggcatgggagagaagcaggtccccataaatattgctgggacaaggatcagtgatggggaatggctctatgcagacactgatggaattctgatctctcgaacagagctgtctgtttgatttcaattcatgaatacttcatgtaaggactatatttatgggcagcacacgacctagtatagtgcagttcggtacttgtgttcttgacccggttccttgcttccacaaaattataaccgataaaatccccttgataatgaaagtatgttggaatgtttgtccatttcataccaacattatctgtgttgtagcttgttttaatggttgtctgttactaagtttggagagatataagtcaaaagtgcaaagtatacacatatccatattttgaccaaatgatcttattgtagtttgctgtaagatgtttcggtctagagaccggaagcaggaaagatctatcttgtgctttaaatttggttggaaacgtctctccttgtcttttttttttttccttccaaatagcagcagcagcataaggatattaactgatgtagacactaaaactcatgtatttctctcctttgtattttttagatttatctgtatcgattattattagccgaccccacctagtgggataaggcgttgttgttgttgttgtatctgtatcgattattatactaaaattctactgcatcggtttgtttgcttacgtaaaagtaccctcctttaat

SEQ ID NO: 8680 - DNA, 624 bp, Glycine max
ttccgcttgcgagaagacgacagatggggacgatcaccaattaaattcttgatcataagctgaagagtccaaatccgagcaacttgaactaattgtcgaggacgccttcattgccacctatgttatgcatcctcttcaaactcacactcttcatacataattagatacattggttgcgcgctcttcctcgtttcctttgtctttctctttcggctttttccatcccttcctttctgcatgcagtgatgctgtgataaactgtgttagagcaacatcatggaacttttcaacatgtaatgattaagaaggaagatcattcatttaactgattaatggcactgatttccgagctactggctaacacaatactcttggtgatgaggcatttttctctacttagactggcatgcttgtttggtatcagaatcgcattaactgtcatatatacttggacggagttgatcggaacaacaattagcttccatgcaaacataatattaagaattatcacatggacatttgggcttatctccctgcctgcaagagttgtgtatgcctttcaaagggagaggcagctggaacaaaaactacatgaaatgcagatagagttggagaatttagtgt

SEQ ID NO: 8681 - DNA, 1210 bp, Glycine max
tcttacggccggggcacattttcccttcgttcaccatttcacctcaccagttagcgaaaatttcaagtccaacgacactcacttcgtgcaggggtggtgctactagtttgttgaaagagcatcttttttcaacctcttgatttcatgagtcactattttgattgaacaagagatgagatttatgcccctttccagattaattttccgtctccctcgtcattatacacatgggcctttgcaatctcgtgccttacagactgattctgttcttaaagatcctcaggctaagccaataaagtacaaaattcctcaattctatgatccctatggccccagacctccaccctcagaaaaaatcgttcagcttgcagaacaaattgaagcactatcagaagaagaacgtggtcaaattatgcccactttgtcagaaagattaaagcttccaaagttgcagccaatttccacagatggcatggacatgggtacagaaggtggtggtgctgctggactgaaggttgaggagaaaaaggcagagaaaacagcttttgatgtgaagttggagaaatttgatgctgctgcaaagatcaaggtgattaaggaggtaagagcatttaccaacctaggattgaaagaggccaaagatcttgttgaaaaggttccagttgtgctaaaacaaggagtcacaaaagaggaggcaaatgaaataatagaaaaaataaaagctgctggaggagttgcagtcatggagtagaattttgattgttggttgagatcacaattcttcatttccaatatgtttttaagttgccatacgcgtggtgaatgactgttggaagaaaattataaaggcacgaagcagatttaagggttaataaccaattgttgaataatctatttgaatcaattttttcttagttgagttttctggttaattactgtatcacttagaactgctgtgttggtttgacatttgtaacactcgttttgcctatcctctgctcaaatattttcttccagagtgaaatatttctgggatcatagggaaaattactttatggaatttcttttagttatttgagattcctgtgcttgatatactaaacttggtggtcttctttggactggtgcctggtggacctcttatgaagtattgtgcctccttttatagatttatagtctattaatttagatgcaaaaaaaaaaaaaaaaa

SEQ ID NO: 8682 - DNA, 1447 bp, Glycine max
tcagctacgttcccccccccccgctattcaccctatcaaagaaagctacctagagcttgcacctattggtatcttctacaatatcctctcatagtgctcttcttcttcttcattttcattatcaagatgtctttgctttcggatctcatcaacctcaatctctcagaatccacagaaaagatcgttgctgagtacatatgggttggtggatctggtatggacctcagaagcaaagccaggactcttcctgggccagtgagtgaccctgcaaagcttccaaagtggaactacgatggctctagcacagaccaagctccaggggatgacagtgaagtcatcctatacccacaagctattttcaaggacccctttaggagaggcaacaatattcttgtgatttgtgatgtttacacccccgctggtgagccacttccaaccaacaagaggtatgatgctgccaaaattttcagccaccctgacgttgctgctgaggaaccatggtatggtattgagcaagaatataccttgttgcagaaagatgtaaattggccacttgggtggccacttggtgggtttcctggaccacagggcccatactactgtggaactggtgctgataaagcatatggccgtgatattgtagatgcacattacaaagcttgtatttatgctggcatcaatattagtggcatcaatggagaggttatgcctggtcagtgggaatttcaagttggtccttctgttggtatatctgctggagatgaggtgtgggcagctcggtacattttggagaggattacagagatggccggagtaattgtttcatttgatcccaagcctattccgggagattggaatggagctggagctcactcaaactacagcaccaagtccatgagagatgagggtggttatgaggtgattaagaaggccattgaaaagcttggattgaggcacaaggagcacattgcagcatatggagaaggcaacgagagacgtctcactggaagacatgaaactgcagacatcaacaccttctcttggggtgtggcaaaccgtggaagctccattagagttggaagagacacagagaaaaatggcaaaggttactttgaggacagaaggcctgcttctaatatggatccatatgtagtcacctccatgatcgcagagactaccatcctctggaaaccatgaaaaacagtcatatagtctctagatttggaccactaaaaattgtgttcaatagtcatttgatctaaaaatttatatttgcaaggtgatgtttagttaggaatttctaagtggtctttttgagcctccatgtgccatgtctatggttgagaataatttcgtcattaataacaagaatttcccataaaaaaaaaaaaaaaaaaaaggcaacagaaaaaaaaaaagtaaaacaaaaaatgaaagcgtcgggagc

SEQ ID NO: 8683 - DNA, 1625 bp, Glycine max
  misc_feature (1623)..(1623): n is a, c, g, or t
acagagatgaaaaatactcaaaaagatagactaatttccggggtttcggttatagcataaacttcactttatttcttttttataaaaagaaaaccatagattatcgctatcttatatcttattccgggtctcaagattcaactgtgaggaagaaaaaggtctccaaacacatagaagcacgtgtatgtatgtattgtgcaagtcatagtattcaacgttaacaccactgactcacttataaaaggcgctttaacaccaaacggagtctctctatcaaaaaaagctacctagagcttgcacctattggtatcttctacaatatcctaaagtgtttttcttcttcttcatcaccatgtctttactttcagacctcatcaacctcaatctctcagaatccacagaaaagatcattgctgagtacatatgggttggtggatctggtatggacctcagaagcaaagccaggactcttcctgggccagtgagtgaccctgcaaaacttccgaagtggaactatgatgggtctagcacagatcaagctccaggggatgacagtgaagtcattctatacccacaagctattttcaaggacccctttaggagaggaaacaatattcttgtcatttgtgatgtgtacaccccagctggtgagccacttccaaccaacaagaggtatggtgctgccaaaattttcagtcaccctgatgttgctgctgaggaaccatggtatggtattgagcaagagtataccttattgcagaaagatgtaaattggccacttgggtggccccttggtgggtttcctggaccacagggcccatactactgtggaattggtgctgataaagcctatggccgtgatattgtagatgcacattacaaagcttgtatttatgctggcattaacattagtggcatcaatggagaggttatgcctggccagtgggaatttcaagttggtccttctgttggtatctctgctggagatgaggtgtgggctgctcgctacattttggagaggattacagagatagctggagcaattgtttcatttgatcccaagcctattccgggagattggaatggagctggagctcactcaaactacagcaccaagtccatgagagaagagggtggttatgaggtgatcaagaaggccattgaaaagcttggattgaggcacaaggagcacatcgcagcatatggagaaggcaacgagagacgtctcacgggaagacatgaaactgcagacatcaacaccttctcttggggtgtggcaaaccgtggaagctccattagagttggaagagacacagagaaaaatggcaaaggttacttcgaggacagaaggcctgcttctaatatggatccctatgtagtcacctccatgatcgcagagactaccatcctctggaaaccatgaaaacacagtcatatgtctctagatttggaccacttaaaattgtgtgttcaatagtcatttgatctaaaattttatatttgcaaggtgttgtttagttaggaattgccaagtggtcttttgagcctccatgtaccatgtgtatggtagagaataatctcttcattaataacaagaattgcttcttgatttcactttttagntt

SEQ ID NO: 8684 - DNA, 1602 bp, Glycine max
tcgagtcagctacgtaggcccccccccgctcacctccctcctttctctcacacttgacaaagaggaggcaccatgacaagcactcttctgtctttgctcttcttgctcttctctcttctcactccaactctaatttcctcttcaccagttctaaaccctcaagaggtcgtacaagaggtcaacaagaaaatcaatggctctatagcaagacccagaaggaacttgggctacctctcatgtggtagtggcaaccccatcgatgattgttggaggtgtgaccccaactgggagcagaacaggcagaggctagcagactgcgcaatcgggttcggcaagaacgccattggcggcagagacggcaagatctatgtggtggaggacgacggcgacgacgacgcggtgaacccgaagccgggaaccctccggcacgccgtgatccaagacgagcccttatggataatcttcgccagagacatggtgatccaacttaaagaagagcttctcatgaactccttcaagaccatcgacggaagaggtgccagcgtgcacgttgctgggggtccatgcataacgatacagtacgtgaccaacgtcatcatccatgggattcacatacacgattgcaagcagggagggaacgctatggtgcgggactccccacggcactacggctggagaaccgtatcggacggtgacggcgtgtccatcttcggagggagccacgtgtgggttgaccattgctcgctgtctaactgcaacgacgggttgatcgacgccatccatggctccaccgctattaccatttctaataactacatgacccatcatgataaggtcatgttgttgggtcacagcgattcttacacccaggacaaggacatgcaagtcactattgctttcaaccactttggtgaaggccttgttcaaaggatgccaaggtgtaggcttgggtatttccatgtggtgaacaatgattatactcactgggaaatgtatgccattggtggaagtgccaatccaaccatcaactgccaaggcaacagatttgttgcacccgatgacagattcagcaaagaggtgacaaaacgtgaagataccccagagagtgagtggcaggattggaattggaggtcagaaggggacttgttagtaaacggtgcctttttcacagcatcgggtgctggagcctcctctagctatgcaagggcttctagcttaagtgcaagaccatcttcccttgttggttccataacaacaggtgctggtgcactcagttgtaagaaaggttctccttgctgaaaaacaatgacttctcttctggctgattcattctttccaaaaaggaaaccaaaatatatacatatgttccaaaagaaaagggagggaaattgaaaaagaaaaggaatatatatatagtggatctttagctttgtatttacttttccttgcatttccatatatctccactctttttccctttttgggggtttcttagattgttttctgctgtttgtcttttcttttgtcaattttgagttgctcacgataacaaaaaaaaaaaattactcttcgaacctagtcagttgaagaatctcgcctttt

SEQ ID NO: 8685 - DNA, 1650 bp, Glycine max
acctcctcacacaacacaaacaccaaatcaaacatggccaccacttttctctctctcctcttcctcctcttctctctcctcaccccgaccctcatttcctcttcccctgtccaagaccctgaatttgtggcccaagaagttcacaggaaaatcaatgcttctgtagctagaaggaatttggggtacttgtcctgcgcaacagggaaccccattgatgattgctggaggtgcgacccaaactgggagaagaaccgccagaggctagcggattgtgcgattggtttcggcaaaaacgccatcggaggaaagaacggaaaaatctacgtggtgacagattccggcgacgacgatccggtaacccccaagccgggaactctccgttatgcagttattcaagacgagcctctctggatcatcttcgcaagagacatggtgatcaagctgaaggaagagctgatcatgaactcattcaaaaccattgatggaagaggtgctagcgtgcacattgcgggtggtccatgcataacgatacagtatgtaacaaacgttataatccatgggattaacattcatgattgtaagcaaggtgggaatgctatggtgcgggactcaccacggcactacgggtggaggaccatatcggacggtgatggcgtgtcgatctttggagggagtcacgtatgggttgaccattgctctttgtctaactgcaatgatgggttgatcgatgccattcatgggtctactgggattaccatctccaacaattacatgactcaccatgacaaggtcatgcttttgggccacagtgattcctacactcaggacaagagcatgcaggtcactattgctttcaaccactttggtgaaggcctagttcaaagaatgccaaggtgtaggcatggatattttcatgtggtgaacaatgactatacccactgggaaatgtatgccatcgggggaagtgctaatcctaccatcaatagccaaggcaacaggtttgttgcacccgatgacagattcagcaaagaggtgacaaagcatgaggatgcagcagagagtgaatggaaggggtggaattggaggtcagaaggggacttgttagtaaacggtgcgtttttcacggcatcgggggctggagcctcctctagttatgcaagagcttctagcttgagtgcaaggccatcttcactggtggggtccataaccactggtgcgggtgcactcacctgtaggaagggttcccgctgctgattatgacccctccagcaagcaactgtatctgcaggccgctccattaattccaaaaaaatggaatggaatcaagaatcaaggggggagggaaggggaaagagaatgaccttattaaattaactacggtcatttctttaatagttaggatgtatattttcctatgatttccttcctgcattcttttcttttgttttctctagtttttttttttttttttttttacttttgggtttctgatttggtctacttttgtatgattacaatttacaacctccgcctgtaaacctcatagaaccaaatttgtgaatctggtatgtgagaaagcaagtgcagaagagttgatatatatgatgatgattacatgtttttttattttaaaaaaaaaaaaaaaaaaaa

SEQ ID NO: 8686 - DNA, 1351 bp, Glycine max
tacggctgcggaagacaacacagcagagggtctgtccattgaaaccactctccaaaatttctctctctctccatccatccatctattgcacacttccatcatcatggccatcgcaacagagactcaacctcaacctcagcaacacaaggattcttcggaggtttcgggttcagctgcggagcaacgaaggtggacgctaaacgatttcgatatcggaaagcctctcggaaggggaaaattcggtcacgtttatttggccagggagaagactagtaatcatattgttgctttgaaagtactcttcaagagccaattgcaacaatcccaagttgtgcatcaacttcgacgtgaagttgaaatacaaagtcatctccgacatccccacatcttgcgcctctatggatacttttatgaccagaaacgagtttatttgattttagagtatgcacccaaaggtgaactttacaaggaattgcaaaaatgcaaatatttcagtgaaaggcgtgcagctacttatgttgcatcattggcccgagcccttatatattgccatggaaagcatgtaatacatagggacattaaaccagagaacctgcttattggttcacagggtgagttgaaaatagcagactttgggtggtcagtgcacacattcaatcgcaggcggaccatgtgtggcacactggattaccttcctcctgagatggtggagagtgtggaacatgatgcgagtgtggatatatggagccttggtgtcttgtgctatgagtttctttatggagtccctccttttgaggctaaagaacattctgatacttacaggaggataatacaagtggatctgaagttccctcctaaaccaattgtgtcttcagctgcaaaggatctcattagtcagatgctggtcaaggattcctctcaacgtctaccattgcacaaactcctcgaacacccttggattgttcagaatgccgagccctctggtgtatataggagctagtgcaccttatcattcttatattgtattttcttaatcgtggaaatcatcaaaatagcagctgcttctaagtatttgacaacattttggttttgagatgatgcaactatttgaagtaggttgctaggttaagagaaatcacttgttatatgattgtaaaccctactccttcaagggctatataaagaataactgatgtcacttgttatttgattgtaaaccctactccttcaagggctatataaagaataactgatgtcacttgttgattgtaatccggtatactccaaaaggaaccgcccgtgttatcaatactgattttttattcgcggtattaaaaaaaaaaaaaaaaaa

SEQ ID NO: 8687 - DNA, 1291 bp, Glycine max
tcagctacgtaggccccccccccccccgaacagaggctctgtccattaaaaccactctccaaaatttctctctccattccttgcgcttccatccatcatggccatcgcaacagagactcagcctcaacaacacaaggattcttcggaggtttcgggttcagctgcggagcaaagaaggtggacgcttaacgatttcgatatcggaaagcctcttggaaggggaaaattcggtcacgtctatttggccagagagaagactagtaatcatattgttgctttgaaagtactcttcaagagtcaattgcaacaatcccaagttgtgcatcaacttcgacgtgaagttgaaatacagagtcatctccgacatccccacattttgcgcctctatggatacttttatgatcagaaacgagtttatttgattttagagtatgcacccaaaggtgaactttacaaggaattgcaaaaatgcaaatatttcagtgaaaggcgtgcagctacttatgttgcatcattggcccgagcccttatatattgccatggaaagcatgtaatacatagggatattaaaccagagaacctgcttattggtgcacagggtgagttgaaaatagcagactttgggtggtcagtgcacacattcaatcgcaggcggaccatgtgtggcacactggattaccttcctcctgagatggtggagagtgtggaacatgatgcgagtgtggatatatggagccttggtgtcttgtgctatgagtttctttacggagtccctccttttgaggctaaagaacattctgatacttacaggaggataatacaagtggatctgaagttccctcctaaaccaatcgtgtcctcagctgcaaaggatctcattagtcagatgctggtcaaggattcctctcagcgtctaccattgcacaaactccttgaacacccttggattgttcagaatgccgagccctccggtgtatataggagctagtgcacctcattcttttattgtattttcttaatcgtggaaatcatcaaaaatagcagctgcttctaagtatttgacaacatttggtatagagatgatgcaaactatttgaagaagttagttgcttgctgggttaagagaagattttatatttgttaaaacatgtagccgtttggttgagatgtcacttgttatttgattgtaatttcctactacccaaggcagagctaattattttgcggtaactccaaaaggagccgcccgtgttatcatcaatatattcctaaaaaaaaaaaaagggggggg

SEQ ID NO: 8688 - DNA, 2725 bp, Glycine max
  misc_feature (407)..(407): n is a, c, g, or t
tgaccatagttctaattctttgaatttaccaccgaaagatagtcaagacacaagtggtaatgtaagcagtgaagcttctatacatctgcctcaccaattatttggtggtaatagttgccctaatcttactgaacaaattagtgaaaagtatcagaacaaaaccttccccatatcaactcttgttgagagttctccgttgcttgatcagaccagacccagagaggaaccacacattgggctggaaccccattctgtttctgattacactgctaactcagtggagcagttgccacctagcaattttacacctgatgttgtcgtgacctcaatttctaagcctgatgagaactctggacatctacattgtgttgcacccaccattgccttatcttcagctggatctaacnaggattgagttaccacctgtgagtggtcctggtatggaggtgaagaccaaattggatattgtgcatgaagagcaacattctggaagagacatctcagtatccgagcccgctccggcggcccccccccccattaaatctcatgaacccaaaaaggctaccgagaagaaatctaagaagcaaaaatcagccaaatctcagtcttctgatcaaacaaagggagtgctaaagagtgtcacttcgcagccagcaaatcaggcagaagttgaaataccaaaattaagtgagttgggggaagccaacagggctgaatcattacatgaaacaaacatgcaacaaacaagagttaagggaactcagattggaagtgcagtcatagaggcagttgatcaccaacaagctggtggctggtctgctaatgttactggcaacgtcactggatcagttgatgtgggtgaggccaaggcagctagctctattgtgatgcagaaagctgaagtacctgcaggacgagcttggaaacctgctcctggtgtcaaaccaaaatctttcttagaaattcaacaggaagaacagaggaaggcagagactgaaatgcttgtatctaatattgctgtttctgtcaattcaatgagtctggtaagtccctgggctggggttgtgtccaatccagactctatgaaagtttctagtgaaagtcacaaaggagccaatacagaatatcctgttaaatctgaaacttctcaaaatcttaaaagcaagaaaagtcatctacatgatctattagcagaagaagttttaaagaaatctaatgaaatagaagctgaggttctagatagtatattgcccttacataatatagctgtacgttcagaatccgtggatgatggcaattttattgaggcaaaagatactaaaagaagccgaaaaaagtcaggaaaatcaaagggttcgggaactaaagcttcattgccagttgcatcttctgaggcacctatagtttcaagccccattgaaaagggaaaaaactcctgttcagcacagcaagagaaagaagaattgcctgccatcccagcaggaccctctctgggagattttgtactatggaaaggagagcgagaaccaccaataccatctccttctccagcatggtctactgattctggtagagttccaaaaccaacttcattaagggacattctgaaggagcaggagagaaaaggctcttctgcaattcctgtgagcccaatgcctccccctcagaaatctcagcctcctcagtctacatggagcagtgcttcgtcacggtcaatttcagcatcctctccatctaaagctgcttctccaattcagataaattcccaagcttctcaatcaaagcacaaaggggacgatgacttgttctggggtccaatggatcaatctaagcaagatactaagcacaggtcaggtttccctcagcttgtgagccagggtagccggggttcgaaaaatgttcccttgaaaggtaattctcctggattattgacaagacaaaaatcagtgagtggcaaaccaactgagcggtttttagcatcatcacctgcctcttctcaatcagtgctgaagttgaaaaaagatgccatgacaaggcattctgaggccacggacttcagagattggtgtgagaatgagtgcgttaggcttattgggacaaaagatacaagtttccttgaattttgcttgaagcaatctagatcagaagctgagatgcttcttatagaaaaccttggatcatatgatcctgaccatcaattcattgataaattcctcaattacaaggagttgttaccgtcagacgttttggacatagcttttcagagtaggaatgataagaaagttactggatatggtgtggaaggcacggcatcggttagtgcagatatactggatgtggactacactgaaggatcctctaaaggaggtggaaagaagaaaggtaaaaaggggaaaaaggtcagcccatcagttttgggatttaacgttgtgagtaaccggatcatgatgggtgagatccagtctgtagaagattaatttaattgagttgatgaggttgttatcgtagatgtacatacattttggtcggactttgtaaatggttttttccgttttaggtgttttatatgttcttttttatacagaaactttagcagtattgactggatctgcttaaccaattttgttatctaatgtagttgttttgacgtttcattgcgttgacaatgattttatctcatgtcaatcttaacgagtttttcaattcatctttcatcatttaaaaa

SEQ ID NO: 8689 - DNA, 1433 bp, Glycine max
tcgagtcagctacgtaggccccccccccccgagagaaagaaagactctgcaaaaacctatcctgaaacggttcgcagagaggcagcaaaacgctaaagccctaaacccccatattgagctttctccctctctctccgtcttcgatggcaacatctcttctgaaaactccgctcaatgtgttcaacagacaccacaatcacgtcgcattcttctccaatggcacaagtgcaagaagcagtgctccaatttcgcagaagaggagatcgcgtccattccccgtagtgtcaatggcatccacaccggttcaaacttctctcgaaaaaactgaactttcgtccaaaagcaccggtcttccaataatggttaatgcatgtactggaaaaatgggaaaggctgtgattaatgcggcggaagctgctggactgaatgttgttcctgtgtcgtttgggtgtgaagaggagtctggacagacttttcagattggtggaaaggagtttctagtgcatggtccttctgacagggagagtgttcttgcatctgtgcttgataagtatccaaatttgattgttgtggattacacaatacccgatgcagtcaatggcaatgctgagttatacagtaaggttggggtgcccttcgtgatgggaaccactggtggagatagggacttgttgcataagaccgtgttagattcaaacatttatgctgtgatatccccacaaatgggaaagcaggttgttgcttttcttgcagctatggaaattatggcagagcaatttcctggagccttctctgggtattccttacaggtattggagtcccatcaagcaagcaaagttgatgcatctggaactgcaaaggctgtaatttcttgcttcaacaaactgggggtgtcttacgatatggatcagataaaattgatcagggatccccggcaacaacttgaaatggttggagtcccagaggagcatctatctggtcatgcgtttcatatgtatcatttgacatccccagatgacacagttacattcgaatttcaacataatgtttgtggtagatcaatatatgcggagggcactgttgatgctgtgctgtttcttgctaagaagattgaaacaaaggatcccaagagactgtataatatgattgatgtcttgcgagagggtaatatgcgatgaaattttctttggaatctgggtgcaggatgtcaaatgtagaacttgcaataaaagagatatgacattctagtttttgagaaccaaacaattttcatcttctgttcgtgatcttttttgataagttaggaaagcttagtgtatgtatcattaagaatcgactctagagctatgtaaacactgcttatgcaacttttgttaatcggatcactttacaatcgcttttccgactgtaatattttttgttcttctaaaaaa

SEQ ID NO: 8690 - DNA, 1416 bp, Glycine max
caagtgtctcaaaccttttctttctttcttttgaatttcatttcaatttaatttccatttcatttccccctttctctgcaactccctccaatttagttagagttatagaggcattgttgctgtttggaaacagatctctgatctgaaaatgagtgcatcgaggttcattaagtgcgtcaccgtcggcgacggcgctgtcggcaaaacctgcttgttgatttcctacaccagcaacacttttcccacggactacgtgcccacggtttttgacaatttcagtgctaatgttgtggtggatggaagcaccgtaaacctggggttgtgggatactgctggtcaggaggattataataggcttagacccttgagttatcgaggagctgatgtatttatacttgccttttctctcataagcaaggctagctatgaaaatattgcaaagaagtggatccctgaactaaggcattatgcccctggtgttccaataattctcgttggaacaaagttagatcttcgagaagataagcaattttttatagaccaccctggtgcagtaccaataactacaacacagggagaagaattaagaaaactgattggtgctcctgcttacatcgagtgtagttcaaaaacacagcagaatgttaaagctgtctttgacgctgccatcaaagtggttcttcaaccaccaaagcaaaagaaaaagaagagaaaagcacagaaagcttgctcaatattgtgattaagaatcagaaggcttgctcaacattgtgatttaataaccagagattaataggaggtattgactgtctggccaacgtttaatgttgcctctccattggtttgtcttgttttgttccctatcctctgtagcagagcaggaagctgtgtatagtttggactgacttcttaggccttataatcaatcacatgattactgccttgtctgtctcattttcatactctgtaattaaaactagctcaattacatagctggtgcctacctatttccttctactattattatgttagtagcccatactgcttgctttgtgaatgtggtcatattcatttggcctttttgatgtcttctatgaatttctttaatggttttggtcagatgttgcacattttaaattttaacacttaagggatgttattgaaggataaaattccattttggtttatgggatgtaccatttaaatatttacatagctatacgtgttcttgtatctgtggatccagatctcctgcagatacattttttaactgcgcatatcctacctaagcgttaaaatttcttgatttatttgtaccaaaataatttttctcaactgtaggggactcagtttcaaactaagctaatatgaagtttaacttattttcttagctcaaaaactcaacttaaaacactg

SEQ ID NO: 8691 - DNA, 1044 bp, Glycine max
tcccacgcgtccgacggctgcgagaagacgacaggaatttgattcggcaaagttgatttcaattcaatttgatttccccctttttcttctccacgtttgtgcctgcaacctcaaataccgattagggttcatgctacactgaacttggtttcggtgttccaagttagttagaggcattgttgcttgcatagatctctgatctgaaaatgagtgcgtcgaggttcattaagtgcgtcaccgtcggcgacggtgctgtcggcaaaacctgcttgttgatttcctacaccagcaacacttttcccacggactatgtgcccaccgtttttgacaatttcagtgctaatgtggtggtggatggaagcaccgtaaacctaggattgtgggatacagctggtcaggaggattacaatagattaagacccttgagctatcgaggagctgatgtcttcatacttgccttttctctcataagcaaggctagctatgaaaatattgcaaagaagtggatccctgaactaaggcattatgcccctggtgttccaataattctcgttggaacaaagttagatcttcgggatgataagcaattttttatggaccatcctggtgcagtgccaattactacagcacagggagaagaattgagaaagctgattggtgctccggcctacattgagtgtagttccaaaacgcaacagaacgtgaaagctgtctttgacgcggcaatcaaagtggttatccaaccaccaaagctaaagaaaaagagaaaaacacagaaagcttgctccatattatgattgagaatcagaaattaacagtaggcagtgactgtttgaccaatcttcactgctgcctctccatcaatttgtattattttgttccttgtcctccctctgtagtttgcaggaagttgtgtacagtttgaactagcattgtaggatcatgcctcatttcatactttgtaactacaatgaacttaattatataactgtcgatttcctttcaaaaaaaaaaaaaaaagaaaaaaaaaaaaaaaaaaaaaaa

SEQ ID NO: 8692 - DNA, 1232 bp, Glycine max
aaaaaaagcaagcgaaggaaagaaaagaaacgagagttcagctgcctccgcccccccccatgttctgaagtctgcttctctgcttgtatgcaacggccacacacacccttagtcgcctgaaaacgattgttgttgcagggcaaacacaaagatccgggtcgacccgtcgcagatccgatccaaataagaaagatgaatattttcaggttagccggagacatgacccatttggccagcgtcctcgtcctcctcctcaagatccacaccatcaaatcctgcgccggtgtctcattgaaaactcaagaactctatgcactcgtttttgcttgtcgctacttagatatctttacttattacgtatctctctataataccattatgaagttgatattcttgggaagctcattttctattgtgtggtacatgaggtaccacaaggttgttcgtagatcatatgacaaagatcaagatacctttcgccattactttcttgtattgccctgcttactattggccctattaatcaacgagaaattcacatttaaggaggtcatgtggacattttccctgtatttggaagctgttgctatacttcctcaactagtacttttacagagaactagaaatattgacaatttgactggacagtatgtctttcttctcggtgcatacagagcactatacattctcaactggatctatcgctactttactgagccccactttgtccattggataacatggatttctggccttgttcaaacactactctatgctgatttcttctattactatttccaaagctggaagaacaacaaaaagcttcatttgccagcatgagtgtattcttctgttcttaaaaacaagggtctatgtggacaattaacagtgagcagagaggatccacaaatttgtctggacatagtggtttctgatttacaattgcctatttgttcgttcttgccagctcaaatactactgtactaattactaggaagattatagacaaaaagcatcaaattgtttgtgattgtaatttgcaattttaactagaaaaagtatttagatctagattgtggcacaatgcttattttgatcttttactcttccctttcttcatttaacttgggtagtattaatacagataaagatcgttcttgatcaacactttgttttcatggtaaagactcttttcctgatcttctaaatttcaaaaaaaaaaaaaaaaaagc

SEQ ID NO: 8693 - DNA, 894 bp, Glycine max
  misc_feature (886)..(886): n is a, c, g, or t
gggaggtttacgataaaacgaataaaaagtggacacttgagctaccttcggattctcacttgctgttgtatctgttctgcgctttcctagaacatccaaaatggatgttacatgtggatgccatgtcatatgctggagctcaatctggcaaaaacccattattcttgggagtccttcccccaaaggaaaggtttccagagaaatacattgctgtagtgtctgctgtcccttctgtgctgcacccaggagcatgtatactagcagttggaaagcagggtcccccaatttttgccttgtactgggataagaaactgcagttttctcttcagggaagaacggcactttgggattccatcttgcttctgtgccataaaattaagatcgggtatggaggtgttattaggggcatgcatttaggcgcttcagctttaagcattctcccggttatggaagcagaatatgaagattaaattttgtatgattgagaaaccactctgcttctatcaacattcagcacgcggactacaacttctgcagtaaatcgcaattcttggagccagacattgcaggtaagaacacgctggagttgaactcctgattttgggtgttgattagaattatgatgtttacaattcccggctcaaccatttaactgtacctgggatattgcactttgtcagaaatgaaatttggatagctcctgcccaaaagatttacagtctctttgtatgcccttcctcctcgaatgcagttctctacatactcgatgctttccttgggggaaacttgtcccggcccatttgatttggttgataaaactaaaacaaacagaaactaaaacagagcatattttaatgtaatttaattgcatttttctgtttctganaaaaaaaa

SEQ ID NO: 8694 - DNA, 1392 bp, Glycine max
caattgggtaccgggccccccctcgagtcagctcagctacgtaggccccccccccgaaacgttgtggcaagacgcaacaatagcgttagcagaagagagccaaatccgtcttttgactcataagtaaccaaccgcttctttcaatcaactgaaagtctttatgttttcttaaggttactgtctgtctctgttttatatgtggcatgggcatgagatggatctgtattccatcatgtccatggaagaatagttaactactttccttttttggtgatttctaaggttctaatttataatatgggagtggaggagaacacccctaactccatttccacctcacaatgccacgaagaacaaagcaacaacaaaatcaacacgcatgtgctcttgaatgtctacgatctcacccctgtcaataattacgtctactggtttggatttggcatctttcactctggcattgaagtacatggtaaggagtatggttttggagcccatgacttcccagctagtggagtttttgaagtggagccaaggaaatgccctggattcatatatagatgttccatctctttgggtcaaaccaatatgaatccttctgaatttcgtacatttattgaaaacatggcttctgagtatcatggagatacctatcaccttataactaagaactgcaatcattttacagacgatctctcttatagattgactgggaaacaaatcccaggttgggtgaatcggcttgctaagctaggtgctttgtgcagctgtctacttcctgaaagtcttcaagtaacaagtgttaaacagctacctgaataccatgaatgctcggaagatgaatttgttgaatctctttcacctgccacaccccgtgagtcaacagaaatagatgaggagcaagaaaagcaccttcttttgccatcagatagaactgaggatgttcatttcgttaaagagacgcaagtgaaataagcggtgtctttgaggtgagaaataacacaggctgtcttcgctttgaatatttatccatttgatttgcagtgattcttttttctcaaagttttctcattcttccatggctttctacattctcttgggtttgggttcattcatggaaactgaagaatccattgttttgttgtgtataaaaggttctcaaatgaggctaatttgtttgtgtaatattatttttattttttttgagggacggaaagtggggcgaggtttgaggctcacaagtatttgtcatgtaaaattgtaaatgacatcagacatccacgtttgaaactgttttaagttatgaaatattagccagtttgtttgaggacatgatgaaaaagccgtctcccccttgtgagcacgtcaacccgggaattaataccgaaccgg

SEQ ID NO: 8695 - DNA, 687 bp, Glycine max
  misc_feature (662)..(662): n is a, c, g, or t
  misc_feature (685)..(686): n is a, c, g, or t
ggagaagcaagcgttgaatacgacgtcgtggaggagcaaagccttttcccgaagcaagatcgtggtcgttgttgggggttcagacagcgcaattgaaagctcaggagcattgttccgataaatctgtcgcaggaaaacaaaacaaaaggaaaaagatgattagcattctcacccaggaacggcttctgggagcttcattgggagttgtattgacgggagttgttgtgtttgagcaacgcagatacatctacgcttctatttccgattcccaatctcaggttaaagaacctatatttgggaagaagtcacgttctgaatttgcacatgtatggaacaaaactgtggatcagacatttggacctttgataaagtctctcagctcacgtggatggtagaaatgttatgagtgattttatttttagtaccatctcttgtaattttgatatcaaaacatacaatacttggccttatttttgccttattctaaatagtttgttaaatggttgtgcacatgggcagtgctgacgatgtttaaaaaccagtgtaatgttttctgcaatacttttgtgttgctttaatatatgaatcaagatacctgattcttcttccgtggaaaactactaatttctaaatattagaattttctgacccggggatcctantctaaacggcgcccggggggacnnt

SEQ ID NO: 8696 - DNA, 1107 bp, Glycine max
  misc_feature (6)..(6): n is a, c, g, or t
tcgagnagcgccacacatacacaacacaacacaacctcatcaatttgtgtggcaaagaatttagatagccttgctctcaaatccaaccctctcagactgagcagagacacacacacacatcctaatcacaaagcgttggccatggcaaacatgattgtggcttccaccaaacctctggttccagtctgcaccagttcccgttcccccacacccaaagtccccattctccaaatttcactccccaaagccccaaccttgaaactgaaactcccgatttcaaagccccagatgctgtccctccttggagggatagcaccactggtcttggccagaccctccctcgcagaagaaattgagaaagcagcactctttgacttcaacctcacccttcccataataatggtggagtttctgctgctgatggttgccttggacaagatatggttcaccccgcttgggaaattcatggacgagagggacgcggcgatcagggagaagctgagcagcgtgaaggacacgtcggaggaggtgaagcagctggaggagaaggccaatgctgtcatggcggcttctcgggccgagatagcggcggcgctgaacacgatgaagaaggagacgcaggctgaggtggaacaaaagattgctgaggggaggaagaaagtggaggctgagctgcaggaggctctggctgccttggagaatcaaaaggaagaaaccatcaagtcccttgattcccagatcgcagcccttagccaggagattgttaataaggttcttcccactgcttaatatgtctgtgtaattttcatttcaatcccctcaccaaaggattcatagtttctacttttgaatgggtctattctgtaatcgcaatacttttcaatgtaaaatccgagattcaggttatgaattgggctcccattgttttttgttttttttaaatatatagaaaacgtaggaaaaatccccaccccagctatgtgcatctcttctctcgttatatgctagttttttttagggcaaggcaacatgaacaggttctgaggagatagatactgagttatacattttgtgttgatgcatttgctatgtgacgtgtgtttctga

SEQ ID NO: 8697 - DNA, 983 bp, Glycine max
aaaatcagctacgtaggccccccccccccccagccactgccacacaacctcatcaatttgtgtggcaaagaatttagatagtctagctctcaaatcctcttcttctcttccatccaatcctctcagactgatcttagacgcaaacacatcctaatcacaaaagcggtgaccatggcaaacatgattatggcttccacaaaacctctggttccagtctgcaccagttcccgttcccccacaccaaaactccccattctccaaatttcactccccaaagccccaaccttgaaactgaaactcccaatttcaaagccccagatgctgtccctcctgggagggatagcaccactggtcttggccagaccctccctagcagaagaatttgagaaagcagcactctttgacttcaacctcaccctgcccataataatggtggagtttctgctgctgatggttgccttggacaagatatggttcaccccacttgggaaattcatggacgagagggacgcggcgatcagggagaagctgagcagcgtgaaggacacgtcggaggaggtgaagcagctggaggagaaggccaatgctgtcatggcggctgctcgagcggagattgcagcggcgctgaacaccatgaagaaggagacgcaggctgaggtggagcagaagattgctgaggggaggaagaaagtcgaggctgagctgcaggaggctctgtctagcttggagaatcaaaaggaagaaaccatcaagtcccttgattcccagattgcagctcttagccaggagattgttaataaggttcttcccactgcttaatatgtctatgtaattttcatttcaatcccctcaccaaaggattgatcagtttctacttttggatgtgtctattgtgtaatcgtaataattttcaatgtaaaatcagagattcaggttaaaaaaaaaaaaaacattgtttttttccttaaagaataaaaaaaaaa

SEQ ID NO: 8698 - DNA, 1193 bp, Glycine max
tcgctgatatttttttgttttagattgagaggattatcttttccctgaaaatccatagcgttatcctcttttgcctccaaaggttgttatggatagatagatagatagaacgctgctttgagtttcctcaactcaagaatggctgccaacgactcgtccaccgagattgatactaagaagctttcgaattgttggggaaatgctcaaatgccctttgcactccccactctcctctcttcaccaccccaacacctccacacatcattcaccactgccgctgacaattttttcagatttctacactcccttgcttctcataactctttcctcaacaaaattctctctctcccctccgaatttcacaccctttgcgtgcagattgggaagcaaaggaacgtgaggttggtttctggtcataatttcgctgccgttttgcctggggattcggtggcagggctggtggtggcgaatggggttctgaatttcttgaacatttacaacactttgctcattgtcaggcttgttttgacatggtttcccaacactcctccttccattgttagtcctctcagcaccatatgtgacccatacctgaacatattccgtggacttattccccctctgggaggaacgctggatctctctcccatcctagcattcttggtcctaaatgccttcaccagcactgcttctgcactccctgctgagcttccagtcacagaacaatccaaacaaggccttgcagcaccattgcactccactaaccttactacttcacagaagaaatggttgacacggtttcaagggaacaggtcaaggacatctggtgctgatgctaaatagaacatgggagagtttatttgtgcctctgtgtctgtttattaatttagatacgttccatcccgattatgatagttctattctaggcaacacaatttttgagcttatgattccagagattttagagttatggagtttgctgttgaaagctcaaggctcaagcttccacagtcctattgtgttttttcttttaatcctatggtcttcttagtcaataaacttaaggtccttatttaaattggggactggattggattacagaataatcatactagtaattcaattaaaaaaaaaaaaaaaacattttagttaaacaaaaagaaagaccctcaggaatgaaaggattatatttt

SEQ ID NO: 8699 - DNA, 1045 bp, Glycine max
gactttgaccgatccgttcgaagcgctttcgcattcttctcttcgttcgtttcgcctcttcccaacccatcccgcattcattttctctttctctctgtgaacacaaaccctaacaagaagaagaaagagcgatgatgcgttggtagatcgtgatctggtgcgggcgcgatcattgtaggatcggtgcgttcgaatttcgcaatgacgtttgggagttgagtgaaggaatcgctattatgtctgaattggtggcccgtacgggccggcatcagcagcggtacgagaacggttaccgtcttgtttccgggtgtgttccatttagatataaaagttctaatgattgtggagaccctagttctgagaagattgttgaagtgcttatgattaattcaccaagcggacctggtcttttgtttccaaagggaggttgggagaatgacgaaactgttgagcaggcagctgtaagggaagctgtagaagaagcaggagttcgaggagacataatggattttcttggacactacgagtttaggagtaagacccatcaagatgagtttagtccagaaggtttatgtaaagcagcaatgtttgctttatttgttaaggaggaacttgagttatggcctgaacaaagtaccagaaataggagatggctagatgtttcggaggcacttggaagcctccggcatgcatggatgagggacgccctggaatgcttctgtaaatggcaagaggataagttggcgaatggaacgaaagaataagatggatttgctgactaattacatttagtgcattgtatctttgtggtaaaaacacttattttggggttggtaccattactttaggacagttaactctaaatcagaattgcatagtagttattgtttcaaatctggattgatctctgatttgtttttcttaattcagagtatataattcataacattggttttagttgagacttgagatgcttgttctcgttgtttgaattgttatctattcatattcatggttagtgcccactccgttaccttgaaatatt

SEQ ID NO: 8700 - DNA, 1364 bp, Glycine max
  misc_feature (1361)..(1364): n is a, c, g, or t
tcgagtcagctacgtagggccccccccgaagctagctgcttgtgaaagacgcaccgcgcagctcgcactctgcagcagcatttgaactctactatcgttttctccgttctttctcaaagccgcactcaactttctaaaaccaaatcggtttgaatcctcatttcccgcctctcactggaaagcagcaaaatcacctttctctactatctatctgttccttttgtactctgagtgggtagaagtcatggtaaggctcactgctgacttgatttggaaaagccctcatttcttcaacacgattaaagagcgtgagttagatctcagaggcaacaagatagctgtaattgaaaacttgggtgctactgaggaccaatttgacacaatagacttatctgacaatgagattgttaaacttgaaaatgtaccatatcttaaccggttgggcacaatgctcattaacaacaacaggattactagaattaatcccaacatcggagagttcttgccaaatttacacactctagttctcacaaacaacagaattgtaaacttggttgaaattgatcctttagcatctcttccaaagctgcacttccttagtctgctggacaacaatattacaaagaaacctaattacaggctttatgttattaacaacctgaaatccctccgggtgttagatttcaagaaagtgaaaaataaggaacggttggaagccaaaaacttgtttgcttcaaaagaagttatagaagagattcaaaggacaccagcaaaaacattttcaactggtgaaactccaaatgtttctgaggcgattgaggaacaacagacgcccaaagtggttgctcctacacctgagcaaattattgctattaaggctgccattgtgaattctcagactcttgaagaggttgctaggcttgaaaaggcattgaagtctggtcagcttcctgcagatttaataagcttgagtgataatataatgttggataatgttgatgaaaaacatgaggacatgattcatgatgatagaagtcaagctgatggcaaatcgaatgatacacaagagcagagaaatactgattctgcttcaatggaacaggattagagtgaaaaggttttcaaatagtcctagcactgtggacttctttaatgtcaggttctagagttagactcttggtaattttccatgaggtgtactttatgaatcttccattacttgagaactggatgtttcaatttcactcgtggtgaatcattgctttggcctttatatatgtgttaaattgtattatttttacactagaacgattatggaatttgcctagagttttttcaaaaaaaaaaaaaaaaggggcggnnnn

SEQ ID NO: 8701 - DNA, 1334 bp, Glycine max
tcgatcagctacgtaggcccccccccccatttgaactctacttctctcgttctctctttctgttcttctcaaagacgcacgcaacgttcagaaaccaaatcggtttgagtcctcattacccgcctctctctggaaaccagcaaaaccacctttctctactatctatcggttccttttgtactctgagtgggtagaagacatggtgaggctcactgctgacttgatctggaaaagccctcatttcttcaacgcgattaaagagcgtgagttagatcttcgaggcaacaagatagctgtaattgagaacttgggtgctactgaggaccaattcgacacaatagacttatctgacaatgagattgtcaaacttgaaaatgtaccatatcttaaccggttgggtacaatgctcattaacaacaacaggattactagaattaatcccaacattggagagttcttgccaaatttacacactctagttctcacaaacaacagaattgtaaacttggtagaaattgatcctttagcatcccttccaaagctgcacttccttagtctgctggacaacaatattacaaagaaaccaaattacaggctttatgttattaacaagctgaaatccctacgggtgttagatttcaagaaagtgaaaaataaggaacggttggaagccaaaaatttgttttcttcaaaagaagttatagaagaaattcaaaggacacccacaaaaagtgaaactcctaatgtttctgaagtgattgaggaacaacagatgcccaaagtcgttgctcctacacctgagcaaattattgctattaaggctgccattgtgaattctcagactcttgaagaggttgctagacttgaaaaggcattgaagtcaggccagcttcctgcagatttattgttggataatgttgatgaaaaacatgaggacatgattcatgacgatagaggtcaagctgatggagaatctaatgatacacaagagcagagaaatactgattctgcttcaatggaacaggattagagcgaaggttttcaaatagtcctagcactgtggacttctttaatgtcaggttctagagtcaaactcttagtaattttctatgaagtgtacttgatgaatcttccattcttgagaactggatgtttcaattacattcgtggtgaatcattgctttagttatatatgtattaaattggattgtctaactagaatgattacggcgttttcgttgaaggttagggagaagattcaaaattgctcttctcagaaacatctacggtttctgatttcaatctaatttgggaaatgaatgagcgtccccgcc

SEQ ID NO: 8702 - DNA, 802 bp, Glycine max
agttgttaaaggcaccggtttgttattttgttatcttgaagtaatccactcacgggtttcttagagttgtgatcaactacgttacttctctcttggttttcttgatctccaccttcaccagttggaatggcaaggagctacttcaagcaagaacatgatcttgagaagagaagagctgaggctgctaggattagggagaaataccctgacaggattccggtaattgtggagaaggctgaaagaagtgacatcccaagtattgacaagaagaagtaccttgtccctgctgacttgactgtaggacagtttgtctatgtgatccgcaaaaggattaaattaagtgcagaaaaggcaatctttatatttgtggacaacgtccttcctcctacaggagcaattatgtctgccatatatgatgagaagaaggacgaggatgggtttctctatgttacatacagtggcgagaacacctttggggatctgatttccattcagtagccattataaattcacaccgtttgaccttgtggtctcattggtctgtctgataaatttgttatagtactcatgtcaagaaccttactctcgatgttttgtacagttgtatataaattccgtgaacttgatcaatattaaaagttctctcattcagtctttcttggttttaaaaatgcataccttggaatgttcattttgattgttcattgatatataaattctcgatgttttgtacagttgtatataaattccgtgaacttgatcaatattaaaagttctctcattcagtcttccgtgaactctc

SEQ ID NO: 8703 - DNA, 857 bp, Glycine max
  misc_feature (18)..(18): n is a, c, g, or t
  misc_feature (30)..(30): n is a, c, g, or t
tcgagtcagctacgtagnaccccccccccnagatcacacacttctcattcaaacaacatccaatccttgttcctgtcctggctaacgttaccgactactttcatatttcgtgtaacgagataaccaccaaaactcgattttttttagtttttaatcaacgaacacatagcctattgttggttgcttctgtttttaattttcatttcagaataggaaccaatggctcatttgctgacaccaactcctaccactgctgcaacagctctctccgccagagcccggaagagccccctctattcgttgaaaaatgtttactttccaacttcaagagtgtgctgcgttggtcaccaatatcaacaatctcacccctcttccctctctgatcttgatcaagtccctcctcccggtggcaatcactctctgcgtcgcaggacattgatggggttgagtggtgcggcaacgttggggttgagtttgagtgatgagcaaagtgcaaggggtgcagcaaggcgtccaccacctccaccaccgacggagaagaaggacccgaatgtgagtggtgttcaggctaaagtgttggctagcaagaggagaaaagaagccatgaaagaagaagtggcaaggctaagagagagagggaagcccgttaataaagaggcacctcctcctcctgctgcacctgaatagtttccacatgtttaacctttctattgtgatcagttacaattggttggtgttattgttgtattactatatcactgttggattgaataagaccgttttgtttgaccgtttatgtagtgaaatgacactcttttcaaaggtgtatggtttcattttaaaaaaaaaaaaaaaaa

SEQ ID NO: 8704 - DNA, 1514 bp, Glycine max
tcagctacgtaggcccccccccccaacaactttgtcacttttttccttgttatgttgaccactcagtgcctacatacataggaagctggaacatagtacaaactcacctccaagtccatgctttttgttcttgcaagagtaacagagaggaggtggacaaacaaagctataatttttagaggggttaccaccctcaccttctgccaaaccaaacccacccttttctctctttaagctactattgtgctgagagctgaagaggagatggggggtggaaatcaagaggcagtgaagcagctgcagaccctgatggaaaatgtggatgatgagcagctgaagaacacattccagattatgcaccagggttatcaaactgaaacgttaatacggtttctcaaagctagggactggaatattgccaaagcccataaaatgttaattgattgtttgaactggagggtggaaaatgagattgacaatgttttaaggaagcctatccccatggatttgtacagagccatacgggattctcaactcataggaatgtctggttactcaaaggagggtctacctgtcattgctgttggtgttggtctcagtacatatgataaagcatctgacaaatactatatacaatcacacatccaactaaatgaatatagggatcaagtgatcttgccaacagctacaaggaaacatggacgatacattggcacctgtgtgaaagtcttggatatgactggtttaaaattttcagcattgaatcaactgaggttgttgactgctatatctacaatagatgacttgaactatccggaaaagacagacacatactatattgttaatgtgccatatgtattctcagcgtgctggaaggttgtgaagcctcttttgcaagaaagaacaaggagaaaaatccaggtgctgcaaggttgtgggaaggaggaattactgaaggtaatggactatgcatccctcccacacttctgcagaaaagaagattccaagtcttccaaacatcatgcattaggaaacattggaaattgtttctccttcaatcacgccttccatcaacaactctacaatcacatcaagcaacaatccatcattgtggagtcaatttcaccaatcagacaagggtccttctatgtagacataccagagccagaccctgatgatgccaaaatagccaagaccatagaaactgagttccacaaattggagaatcagaagaatggctttaccaactcactaaatggtcttagagttaatggccattgaaagctatgctactaaagctactagtaactgtgttttttggcctgtcctgagccacttttatttgttgataactatatgatccctttctgattaggagggttttgcttgtgaggtcaaacttatagccggttattagatgtaatattgtaatgtttacatcaactccatgcagaattcttcccactcttatacctttatggcctgcacttgaagcattatgcaaactctcccca

SEQ ID NO: 8705 - DNA, 1278 bp, Glycine max
gtaaaagaggtgtccgaatcgaacaggagcaagcaaagtcaaagaaaaagagagaggagagagagaaacaacaatcatcatcggccagaagcgaacacgacagacacatctgagaaaccaaacctgatagagatgtcgagtggaggaaaccttagttgcgtgttggtagctgtggatggcagcgaggaaagcatgaacgcgctgcgttgggcactgaacaacctcaagctccgatcccctgcacccgattccaccgatgctccttccttcaccgtcttccacgtccaatccccgccctccatcgccactggcctcaatcccggtgccatccccttcggtggccccagtgatctcgaagttcctgctttcactgcagccattgaagcgcaccaaaagcgcatcaccaacgccgtactcgatcacgccctcggaatttgctccgaattcaacctcaccagtaaggtcagaacccatgttcttgtaggagatccaaaggagaagatttgtgaagcagttcaggatttgaatgctgatgtgcttgtgatggggtctcgtgcttttggccccattaagaggatgttcctgggaagtgtaagcaactactgcgcccaccattctccatgccctgtcattattatcaaggaaaaggacattgtcaataagagaaactgatgcacttctactatgctaccatgattcttgtctcttgatcagtaggttctttaggtgggttgtcagtgccatatttcagttgctgacgctgcatccttgcttgccaaattaattatgtcgaaggctttttcgtcttgcaatttgcttgctttgttagaccagtgttgtacctcagctttgaagcttgtgtcttttgttgagccaatgctggccagaccctgcttcaagtacgtgttttcactttctgtggacaattctgctgtgtgtgtgaaattcttggagttaaagagtgctttataactgtgctgtcacaacgtcaattgttgtcccaaatggttcaaagagatatttgcctccaggtttgtattcgttctgaatttatacaatgttgtacagaaatgttgcattactattgctccttggtcagagccagttctagttgtgattgtgatatgcaacaaactggccatttgacatttgtcatgtacaaattttcaaattgagaatccagctagtgttggctgcagtgtgtcttactgttgcattattgacagtgtcctgcttaaataaatatttatatgatttatgacaaaaaaaaaaaaaaaa

SEQ ID NO: 8706 - DNA, 1154 bp, Glycine max
gtcttgtttaatggccatttagatgtaactcggggaataagtaggaaaattttgtacaatattaagtcttgctattttatttgaatgattgccctcaacatttgcaggaaatgatgaatatgtccgaattggcaatggtaaccagcttatcagagacccaaagagacgaactcgaaaattggcaaatgaaaaagttagatggagcctgcacactgccagacagcgattggcgcgaaagcagaagtattgtcagttttttactagatttgggaaatgtaacaaggatggagggaagtgtccttatattcatgatccctcaaaaatcgctgtctgtactaagttcctgaatggtttatgttctactcccaactgcaaattgacacataaggttattccagagagaatgccagattgttcttatttcttgcaaggcttatgctcaaatagaaattgtccatatagacatgtcaatgtgaaccccaaggcatctatttgtgaaggatttctcaaggggtattgtgctgatgggaatgagtgtcggaagaagcacagctatgtctgtcctacttttgaagcaacaggaacctgtactcaaggaaccggatgcaaacttcatcaccccaaaaaacaaagcaagggaaagaaaaggaagagaactgcagatcagaacaacagtagagggcgttattttggttttattcctgctgatgtttctaaatctgggatgatggtggctccaaagcgacatagacagaatggtgaacttgaagaggaactttctgactacatcagccttgatgttgtgaatgaagaagttgcagatgtggtcgatcaatcatttgagccagcagctttctgtgacaacgattccttggatttacagttggatgattttgatggacttattaaaccagttcttctgttgaaaacaaagttcacattgcaatcacctcagtctagtagcctccaagcttttaggcaagtagcggagacataggtcgtttgtaaatgaggtaatttaggtagtgcaaaacccttccccccgcccccctcaattcttttttagtctcacttattttgaatgtataatgtaaacaggtcatcctccccctccccttcattttttgtggatttacaattgtacattaacatct

SEQ ID NO: 8707 - DNA, 649 bp, Glycine max
ggctcgagaaagtcgaagacgacacaaagaccagctaaacttcattttgaaacacagaaacaacccaaaaaaaaaaaacctctctactttctctctctacattctccgccatttcccgagaaaatctcgccaggtttggtatgctagctaaatctcatgctttccaaataattctcatggtggatgtatctgctttcaacacatgcttccaaaggatgatagttggtattgatatttgattatcagttacatagcagactaaaaagaaagaattgaatcttgcactgctaatcagtgaaagttttcctacagttatttctttgaatctgatataccatctgcatcccttttttttcttctatgtttgtttcctccataattaccacaagggattgtatgaaagataatgaccaatttagtagtagtttgacatccttgtgatctagtaccatgaagattcaggactattgactcgttcataggatcatcaaaatgaagaagttgtatggaggagttctgattgcctcactgtttacgttgtttatgcttatgatcctgcgatacggggtcatgaaaaatcctattggtgagaggttatctgactatacctgtcctcattaaagggactaatcctcttttatggataaaa

SEQ ID NO: 8708 - DNA, 941 bp, Glycine max
cccacgcgtccgcgcggcgccgcgtagccccctgaccctcgtcacaagaaaaaaagaaaactccccttaaacccccccccttcatgttcttttcttttctctttttgctctaagcaaaaaccaccactccgcaccacaccaccaccatggcagcaagagcaaaaactccccttaacactctctcctctttcacattcacactctttctctcattctctctcctccaactttctctctcctcccccaccaccatccacgaccttctccgctccaaaggcttaccaccggggctcctcccggaggaggtgaaatcctacaccttctctgaaactgggcacttggaagtgttcctggacgcaccatgcctcacaaaatacgagaacagagtcctcttcgaacaagtcgtcactgctaacctcacctacggaagcctcataggagtggagggtctccagcaagaagaactcttcgtgtggctacctgtcaaggacattatcgtaaatgacccctcttccgggttgatactctttgacattggcctcgcccacaaacagctctcgctgtccctctttgaagatccacctcactgcaaaaatcaaggtgggttgaggaatcatgtgaggaaggaaaaaggtttcttcgaggccctgaggtagaaaaagatgccaccttatttttttcaggcttcacttgttgtctttttctttggtcatgtttatataaattttagccttgcaatattattgcaactatatagtagtcatatgaattaatggaagtaggtgcttgtagcgtagaggttgagcattgtaaaaatgtgaggagagagagaggagaacaaaagaagaaaaaaaactatggaatctgataatgtcgtaatcaaatttaacttttgttcaaaaaaaaaatctgttttgagataaaaagatatgataattgcc

SEQ ID NO: 8709 - DNA, 923 bp, Glycine max
atcaaaagaaaagaaactccccttaaagaaaaaaccccctcatgttcttttttctctttttggtctaagcaaaccaccccaccatggcagcaagagcaacagcaatctttaacactccctcctcctcctccttcttcacattcacactctttctctctctctctctcctcctccaactttctctctcctccccctctccctccatccacgaccttctccgctccaaaggcttgccccccggcctcctcccagaggaggtgaaatcctacagcttctccgaaaccggccacttggaagtcttccttgacgcgccgtgcctgaccaaatacgagaacagagtcctcttcgagcaagtcgtcaccgccaacctcacctatggaagcctcataggagtggagggtctccagcaagaggagctcttcgtgtggctacccgtcaaggacataatcgtaaatgacccctcctcggggttgatactgtttgacattggcctcgcccacaaacagctctcgctctccctctttgaagatccgcctcactgcaaacatgaaggtgggttgaggaatcatgtgaggaaggaaaaaggtttcgaggccctgaggtagaaaaagatgccaccctgttttttacatgcttcacttgttgtctttttctttggtcatgtttatataaattttagccttgcaatattattgcaactatatagtagtcatatgaattaatgaaagtaggtgcttgtagcgtagaggttgagcattgtaaaaatgtgaggagagagagggaaaaaaaaaaaggaaaaaaactatggaatctgatgatgtcgtaatcaaatttacaagttgtaatcttctaacttttgttcattatgttgtttctgttttgagataaaaagatataataagtgtcaaagcaaaggatcaaaa

SEQ ID NO: 8710 - DNA, 1292 bp, Glycine max
gtctctttgatattttacgcacatttcatttcacagccacagccactgtgaagttcgtaagagatttatgacggaatataataaaagtaataacagaaaataataatagctcggagccaggtccaaatccaatagtaaccacacaccaaaacttcgtctctccgattcactacttgtattcttccttctcttttattctattctaaatttcgcattggacatggctttcacacagcttatcccttcaccttcttcttcctccttaaaccctatcacactctccctaaaccctaaatccccaacctctccgccgcagcagcatttcaatctcgatattctccggcaccggcgccggaggcctaattccactcttcggtgctccgcctcctcgttctcggagaagcaccacacgaactcctcgaactccgacgacgtggtggagctccccctgttccctctccctctggtcctcttccctggcgccatcctccccttgcagatcttcgagttccgctaccgcatcatgatgcacacgctcctccacaccgacctacgcttcggcatcatctacaccgacgccgtctctggaaccgccgaggtcggctgcgtcggcgaagtcatcaagcacgagcgcctcgtcgacgaccggttcttcctcatctgcaaggggcaagagcggttccgcgtgaatggtgttgtccgcaccaaaccctacctcgtcgcgcaggtgacgtggctcgaggaccgcccttctccctccaccgacctcgatctcgacggtctcgccaccgaagtggagacctatatgaaagacgttatccggttatcgaaccggttgggagggaaaccggagaaggaggttggggatttgagacgaaacctctttcccacgccgttttcgtttttcgttgggagcacctttgagggcgcgcctagggagcaacaagcgctgcttgaattggaggacactgcggccagattgaagagggagaaggaaacgttgaagaacacgcttaattacctcactgctgcttctgctgttaaagacgtttttccctcttcttccaattcttcttgattggggcttatactttacctaaggtattgttgcttttaagtgtaacctcgtctcaatatattcagaaaatagatgtaaattatttttgtgcctaaacgctagttgttgtttttttttttcatttgtgatacattttatatactgtgctacttgataaataaaaaatccgacacatacaattttgcggatataatgcaaatagtggtgtggctaa

SEQ ID NO: 8711 - DNA, 1108 bp, Glycine max
aggtgaaagccagagccaaatgcctaagccagtcacattcccgactccaaacattacccagctccgtaggccccccctagctactaatgcgtttcctgtctcacttattctacaaaaacaatggcatcatttccaatcccacagctcctaccatctcacaccaaccactccttaacttgtttcagtagtaacactaacactctgccgttgtcatcctcactgttgcgccgtcgccggactctcgactctctccgatgctcggcgtcgtcggagaagcagccccacgacgacgcgctggagctccctctcttccctctccctttggtcctcttccccggtgcgatcctccccctccagatcttcgagttccgctaccgcatcatgatgcacacgctcctccataccgacctccgcttcggcgtcatctacaacgacgccgtctcgggcaccgccgaggtcggctgcgtgggcgaggtcgtcaaacacgagcgcctcgtcgacgacaggttcttcttagtgtgcaaggggcaggagcggttccgcgtgaacgacgtcgtgcggacgaagccgtacctggtggggcgggtgacgtggctggaagacaggccgtccgagattaatgtcggaggcgatgacgtggaggggctggcgcgtgaggtggaagggtacatgaaggacgtgataaggttgtcgaataggttgggagggaagaagggggagaataaggagattgggaacttgcgacggaatctttttccgacgccgttttcgttctttgtcggaagcacgttcgagggtgctccgagggagcaacaagcgcttctggagttggaggacactgccaccaggttgaagagggaaaaggacacgttgaagaacacgcttaattacctcactgctgcttctgctgttaaagatgcctttccttcttcctcttaagtcaaaactggtacggggatataccaatagtacaatacaagttgtaaattttgattcgtaatttcatctgctcgatatttgttaataattactactactttaaatcatagtaaatataataattttgctgcacgtaaaaaaataaaaaaaaaaaaaaaaaatgattatt

SEQ ID NO: 8712 - DNA, 1334 bp, Glycine max
ggtccggaattcccgcgtcgaccctcccgcgaatgaagatggcgctgctcaaggtacacgcacccacacccacacccacatctgcctctgctcaactgcaatggcgctgcagtgtaagtgtggcacccaccactctggcgtttcccaattcctactccatttctgcggaaagaggaagaagagaatggaattggagggtgaaatgcagcagcagcagtgcggagattgagaaaggggctgcgagttttgggcccgggagcccagtgagagcaaccaacattctggtggttggagcgactggaaccctgggaaggcagattgtgcgacgggcactcgacgaaggctacgacgttaggtgtctggtcaggcccaggcccgctcctgccgacttccttcgcgattggggagcaacagttgtgaatgctgacctcagtaaaccagaaaccattcctgctaccttggtcggcatacacactgtcattgactgtgccactggccgtcccgaggagcccatcaaaaccgttgactgggaaggtaaagtggctcttatacaatgtgccaaggcaatgggaattcagaaatatgtcttctactccatccataactgtgacaaacatcccgaggttcccctcatggagatcaagttttgcactgagaagttcctccgagactctggcctcaatcacgtcattatccgcttatgcggtttcatgcagggccttatcggtcagtatgcagttcccatcctagaagaaaaatctgtttggggtactgatgcccccacccgaattgcttacatggatactcaggatatagctcgcttgacatttatagccatacgaaatgataaattaaatggtaaacttcttacatttgccggtcctcgtgcctggacaacccaagaggtgataaccttgtgcgagaggctagcaggccaagatgctaatgtcactacagttccagtctccattttaagactcactcgccagttgactcgcttttttgagtggacaaatgatgttgctgacagactcgcattttcagaggtatcaatacccttcatcttttctaaactgactcattgctccgccacccatattttcctcagtgttctagttgccttattgctgacatctcataactacaatctttcataaccttcccatctacataaacactgtcttttaagtggctgcctctatgatgattcaccgaaacaaataaacgtgtggtcgcaggttcggtgtactcacgaacttgatttatatctgtttggataaacttctttataaactagttgagtttctcccataagtttaaaaaaaaaaaaaaaa

SEQ ID NO: 8713 - DNA, 2117 bp, Glycine max
gtccgtacggctgcgtgttgacgccggagtggagaagacgaaaagagagtggagagagagagaagtgagagtgtgagagggagcacagtgaagaagagaacgaaggaacgaagatggagactcctcctccgcaacaaggcgtggtgaagaagaaggagacaaggggccgaaaacccaagccgaaagacgaacacgccaaggcgttgaaggaagggagaaaaacacagcaacaacaacatgatcagcagcaacaacaacaacagcaacatcaaccttcggtggacgagaaatacacgcagtggaagtcccttgttcctgtcctctacgactggctcgccaaccacaacctcgtctggccctctctctcttgccggtggggccctcagcttgaacaagccacttacaagaatcgtcaaagactctacctttctgagcagactgatggtagcgtgccgaatactctggtgattgcaaattgcgaggttgtgaagcctagggttgcagctgcagaacacatttcgcagtttaatgaagaggcacggtccccatttgtgaagaagtacaagaccatcatacatcctggcgaggtgaacagaattagggaattgccacaaaattccaagatagtggctacacatacagacagccctgatgtccttgtttgggatgttgaaagtcaacctaatcgccatgctgttcttggagctacaaactctcgtcctgatttgatattgactggacaccaagataatgcagaatttgctcttgcaatgtgcccaactgaaccctatgttctttcaggaggaaaggacaaaacagtggtgttgtggagtattgaagaccatataacatctgctgccacagactccaaatctggtgggtcaattatcaaacaaaactctaaatctggagaaggcaatgataaaactgctgatggccctactgttggaccacgaggcatttattgtgggcatgaggatacagttgaagatgtgactttctgcccatctagtgcacaggagttctgtagtgttggagatgattcttgtctcatcttatgggatgcacgtgttggctctagccctgtggttaaggttgagaaagctcataatgctgatcttcactgtgtggactggaatccacatgatgataatctgattcttaccgggtcagcagacaattctgttcgcatgtttgatcgccgcaatctcaccactaatggagttggatcacccatccacaagtttgagggtcacaaagctgctgttctttgtgttcagtggtctccagacaaatcatcagtattcggaagttcagctgaagatggtctcttgaacatttgggactatgagaaggttggaaaaaagatagagcgaactggaaaatcaataagttctcctccagggttgtttttccaacatgcaggtcatagggataaagtagttgacttccattggaatgcatatgatccatggaccattgttagtgtgtctgatgactgtgaaagtactggaggagggggaacattgcagatatggcgcatgagtgatttgatctacagaccagaagatgaggttttggccgagcttgagaaattcaaatctcatgtggtggcgtgtgcttcaaagactgaaaaatgacatacggcggaggcgaaaatgagttctattgttgctgttgtatttaatttaacacttgcggtggatgtttcttagcattttaaaatcattcatgcatggggctggagtaggaaaaacttagattaacatagaactgacgagggtttgtggttattgttacttaattgatacaattctattttctgtttgaagatcatgatccttggttcatgtgtctctcttcacattgtttgaggttggcaaatttgtacgtgcacgctgctcaattctagaatcactgaaccgaacctacattgttaattcatgatcctttgcacatgaaactctagacatgctttctaggttggcaaatgagatgtttatgttctctactatgtggtcggggctcagaatttgataacttgattagtgtgtaaatcatagctatgtggttgttgtatgcaagttaggggtgtttggtaggagagaagttttttc

SEQ ID NO: 8714 - DNA, 1326 bp, Glycine max
atccaatggccagatgccaaacctcgaccttatcaatattgtaaattatctggcagtacataaacaagggttgcggataaaagtgaagaagatgtggtctctgcttggctccaggtggctctataccttgggtgttatatttgaatccttgggaaaaatttctagaagcttaaatcctcagtggaagtttggtattcctgctactgagtatgttgagggtgctgctacactggcaagttcattgtattaccagggcttaggtgttcccactggtcctcatggtgccttccgtgattatcaagttgatgcaatcacactggaaatttcaccaaaagtttctcttactaaaatgatcaggcgtaatgaattcattctccgtggtggaaggttaattgaaggagtcatacgctcaataaacaaccttcttgagaagtttcatcagtcattttttttgtacctcttgacatcccctagcaagtttgtgtcagttggagtttacatgattccatttgcattacttgttgcaccacttccaatagttgcggcatatctccatgtcaatgctagtgattccactccccaaaccacatctgccttagaagttaatgccagcccaaaatcttggaaatggttgaattcggccaggaaggttttggtcattcatttatggggtgctgtcatctccttactcccatttttcctatgtcaagtacccaataccacaccaacaatgaactttgtattgtggggtttgctatcagcttttagcttgctaattttatacatgatattgggttcaccaatttttgaagctgctgcatctcgacctgagaaaaacaagtgggctagcttaaagtctgtaactatatcaactgcattcatcggtttgtctctcatgtccgtcattaactttgctacagcagagattggggctttacttattgtcccaatttgtctgatggctagaccattgaagcttgattttcaagctaggagttggagaaccttactaagggcctcttgtaatattgctttaggttttattgtgtttcctccagttgcatttgttttactgaaaggtgcatttgaagatttttatggtatgaattttggtgactattggaactgggtggaatccctttgggtttggaacagtgctacttacctctatgtaggtgttgttcacctaccatgctgggcactgtgtattcacattttatttcatccatgttgacatgtactattactttatcgggacaagcaatttattatcttgatgtttatgttttcttctgaaatgaacaattggacatcattcttctctgc

SEQ ID NO: 8715 - DNA, 2062 bp, Glycine max
ccacgcggaagacgaaaagagagttgagagagagtgagagggagtgagagggagcagagggagcgaagagaagaaacaaagatggagactcctcctccccaacaaggcgtcgtgaagaagaaggagacaaggggccgaaaacccaaaccaaaggacgaacacgggaagggtttgaaggaaggtaggaaaacacaacaacaacaacaacatcatcatcagcagcagcaacagcaacaagatcaaccttcggtggacgagaaatacacgcagtggaagtcccttgttcctgtcctctacgactggctcgccaaccacaacctcgtctggccctctctctcttgcaggtggggcccccagcttgaacaagccacttacaagaatcgccagagactctacctttctgagcagactgatggtagtgtgccgaatactctggtgattgcgaattgcgaggttgtgaagcctagggttgctgctgctgagcacatttcgcagtttaatgaagaggcgcggtccccatttgtgaagaagtacaagaccatcatacatcctggtgaggtaaacagaattagggaattgccacaaaattccaagatagtggctacacatacagacagccctgatgtccttgtttgggatgttgaaagtcaacctaatcgccatgctgtccttggagctacaaactctcgtcctgatttgatattgaccggacaccaagataatgcggaatttgctcttgctatgtgcccaactgaaccctatgttctttcaggaggaaaggacaaaacagtggtgttgtggagtattgaagaccatataacatctgctgctacagactccaaatctggtgggtcaattatcaaacaaaactctaaatctggagaaggcaatgacaaaactgctgatggccctactgttggaccacgaggtatctattgtgggcatgaggatactgttgaagacgtggctttctgcccatctagtgcacaggagttctgtagtgttggagatgattcttgtctcatcttatgggatgcacgtgttggctctagccctgtggttaaggttgagaaagctcataatgctgatcttcactgtgtggactggaatccccatgatgataatctgattcttactgggtcagcagataattctgttcgcatgtttgatcgccgcaatctcaccactaatggagttgggtcacccatccataaatttgagggtcacaaagctgctgttctttgtgttcagtggtctccagacaaatcatctgtatttggaagttcagctgaagatggtctcttaaacatttgggactatgagaaggttggtaaaaagatagagcgatctggaaaatcaataagttctcctccagggttgttttttcaacatgcaggtcatagggataaagttgttgacttccattggaatgcatatgatccatggacgattgttagtgtgtctgatgactgtgaaagtactggaggagggggaacgttgcagatatggcgcatgagtgatttgatctacagaccagaagatgaggttttggccgagctggagaaattcaaatctcatgttgtggcgtgtgcttcaaagactgaaaaatgacatacgtcgtaggcaaaaatgagttatattattattgctgttgtatttaatttaacatttgcggtggatgtttcatggcattttaaaaccattcatgtatggggctggagtagggaaaacctagattaacgtagatctgacgatgatttgtggttagtgttacttaattgatacaattctattttctgtttgaagatcatgatccttggttcatgtggctcatttctccaatcactgaacggaacatacattgttaattcattatgatctttatgaaactttagacatgctttctacggttggcaaaaaaaaaaaaaaaaaaccctactatgttttggagtcttagaatttgataacttgattcgcgtgtgtaaatcatatctaggtggttgtatgcaagtataaaggatacggttaagtgtgaatatatggtgctattatttgcaggggg

SEQ ID NO: 8716 - DNA, 1640 bp, Glycine max
  misc_feature (12)..(13): n is a, c, g, or t
actcgagccgannatcggctcgagcatattctaagaatcttctctctctctctctttctatctctctgtggtgtaagcaacaaaattccatcaagtgtgatctctaaataatatgtggagttgtgtgtgtgtggagtactcttacttgataattttcatgtctgcaattgcaagtgcaagtgccgtcgaaccgtgccactagaccaaaaagtgtttttgttgttgccaccatgtgtgtgcaagatggtgaacaagctggtgaagatcatatagagaagaacgttgataacagcataagagtttcatggcctttgcattgggatctcttgaatgcccacatggattacaaggaaaaagactcttcttttagaactccctctgaccagatcagtgttgcaaattcatctcctctggaaagcatatgtgaggatgcagaaattgtggacaaaaaacaaaacttaatgaactttgtccctactcttcggtctggagagtggtctgatattggagatcgcacttccatggaggatacacatatatgcatcggagacttggcagaaaaatttggcaataacgaactttacaaggaagctatttccttttatggtgtatttgacggacatggagggaagagcgctgcacaattcgttcgtgatcatctgccacgggtgattgttgaggatgctgactttcctttggaattagagaaggttgtcacaaggtcatttttggagatcgatgcagagtttgcaagatcatgttctactgagtcttccctgtcttctggtacaactgcactgactgcaattatattaggaaggtctttacttgttgccaatgctggagactgccgtgctgtattgtcccgtggtggaggggctatagaaatgtccaaagatcacaggccattgtgcattaaggaaaggaagaggattgagtctctaggtggatacatagatgatggttacctgaacggccagttaggtgtgactcgtgcactaggcaactggcatctccaaggaatgaaggaaattaatggaaagggtggaccattgagtgctgagcctgaacttaaattaatcacattgacaaaagaagatgaattcttgataattgggagtgatgggatctgggatgtttttcgcagccaaaatgccgtagactttgctcgaaggaggcttcaagagcacaatgatgtgaagcagtgttgcaaggaggtgataggagaagcaataaagagaggagcaacagacaacttgacagtggtgatgatatgttttcactcagaaccaccagctcctatggttgtagaaaggcctagagtcagaagaagcatatctgctgaggggcttcaaaatcttaagtgcttgctagaaggataaaattttctacttctcggcaacacaaatgattctttttgagcttagattattatgtacataaattcatccgtcacagtgttgctgatccctgaggggatgttgtaaggaaaacaccaagatggcaaattcaaataaatttcatgtcatcgtataattattttccccattgctattgccttaatgggaaagtgataaacttgaattacgtatatcttgtgaaatgtaatttatgcatacaattaacatcgcactgtgctc

SEQ ID NO: 8717 - DNA, 577 bp, Glycine max
cagtagtcgctgccattacggcaaaaattaccaaaattgtctcgctaacctcgctgttgtgaatagcgctgctgaatcaatcgttctcggttttcgcgtaatctagtcgttcatcccaaaatggtttgcttggcttgtttgctgcccctttttctggttccgatcgtcaacatcctccctcttctatactattttataatgggaaaaatctatcgggtttttggttgggagtacaggaaaccggagagggctcctcctgtatgtccatacaagcctccaaccaacagggttagtaaagttgaggcagatgttgaacctgttccagcagatcctgttaagcctggaagtgtagatgtcaagcaggattaatctggggtagctattctataaggtttgacgggagtaaaatgtatgataacatctgatggttgatgtatgtttttaacttttattaaatatcttgtcttgtcatgaccattaaaaaataaaaaagatgcttggttggtttaaaaaaaaaaaaaaaaaaaaaaaaaaaaaaaaaaaaaaaaaaaaaaaaaaaaaaaaaaaaaaaaaaaaa

SEQ ID NO: 8718 - DNA, 1406 bp, Glycine max
gccattcggacattgaaaccatcaccattcaccagtcaccaccttcttcctcgcatcgttcgtcttctgtctgtggatttcaaactctgccatttcgattccttcgttcatcgttattttgcttgactattgtagaggctgcagcctggatgattggtgggctttaagcttgtgaaagaataattactggatggaacttgcaagacctgcctcaagtagaagaaaattgaaagatttattgcatcagagtggtaatcgtctttgtgctgattgtaatgctccagatcctaaatgggcgtctgccaacattggagtttttatatgcttaaaatgttgcggtgtgcacagaagccttggtactcatatatcaaaggtgttgtctgtgacattggatgattggtcagaggatgaaatagatgcaatgatcgaagttgggggaaatgtttctgctaattcaatttatgaagcttatattcctgaaggatatacgaaacctggaccagatgctggtcatgagcagcgttcaaagttcatacggtcaaaatatgaattacaagaatttctgaaaccgagtttgcgcattgtgtctggaaaaagcagtctacaatcaagttctgccaaaagtagttttatggacagttttaaaagtactagtagttcacagagaatggaaggtatggtggaatttattggaatgttgaaggtgaaagtgattaaaggcacaaatttagctatcagagatataaagtcaagtgatccatatgttgttttgagccttggccagcagactgtccagacaactataataaggagcaacttgaatccagtctggaatgaggaatacatgctgtctgttcctgagcattatggacagataaaattgaaagtatttgaccatgacacattttctgctgatgatataatgggagaagcagacattgatcttcagtctctgataacatctgctatggcatttggagatgctggaatgtttggtgatatgcagataggaaaatggttaaaatcggatgacaatgcccttattgaggatagcacagtcaatattgttgatggtaaggttaaacaaatgatgtcactcaagctccaggatgttgaatctggagaattagatcttgaactcgagtggattcctcttgagcaatagggacttgactgctgttggcctatgctttctcttagaacaaattgtctgtaattttttctcttcactttttgattcatcttcctagaagaacaaataaacctgtatttttgcctttttaatttgaccaaacattcagtaaattttcttcatataaaagaacgagagagaaatgtcagacgtgacaaaaaaaattcagatgaaaaaaaaaaaaaaaaaaaaaaaaaaaaaaaaaaaaaaaaaa

SEQ ID NO: 8719 - DNA, 1526 bp, Glycine max
gtaccgggcccccccctcggggtcagctacgtaggccccccccccgaggtcagtcaatcattcattcctattccttctttctcttccaattccaaatcacaacccttcgttttccctctctagaatcttcttctccattcaattcctactccttttttcctctctgtccctctctctctccctctctcatggcttccgatctcgaagcaaaagccaaagaggccttcgtcgaagaccacttcgaactcgccgtggaccttctctctcaggccattcatctcgaacccaacaaagccgaattctacgccgaccgcgcccaagccaacatcaaactcaacaacttcactgaggctgtggctgatgctaacaaagcaattgaattgaatccttctctaccaaaagcatatttgcggaaaggtactgcttgcatgaagcttgaggaatatgaaactgcaaaggctgctctggaggtgggtgcatcattgtctccagacaactcaaggtttgctactttgatcaaagaatgtgataagctcattgcagaagaatcttataccccacctattatagaggaaaaggccacaacagaagatgttactccaaaagatgttcagcaacaagatgatcttctagagaagccaacagttacagtgactaaacctaaatataggcatgaattctaccagaaacatgatcaggtggttgtgaccatatttgcaaagaaaatcccaaaggaaagcattactgttgacttcggtgaacaaatactaagtgttagtattaatgtcacaggagaagacacatatgtttttcaacctcgcttatttggaaagatcataccttccaattgtcaatatgaagttttgtccaccaaaattgaaattcgtcttgcaaaagcagaacctattcactggacatctctagaattcaccagagacatcgttgttcaacagagggttaatgcttcttcagttactggaagtcaaagaccttcttacccatcctcaaaacaaacaagagattgggacaagattgaagctcaagtcaagaaagaggagaaagatgaaaagcttgatggcgatgctgcattgaacaaatttttccgcgaaatatatcaagatgcagatgaggatacaagaagagcaatgaaaaagtcatttgttgagtctaatgggacagttctgtctacaaactggaaagaagtgggaacaaagaaggtagagggaagtcctcctgatggcatggagttgaagaaatgggaatattaagacattttctggatcagtgttgcatatatttttatgtgggattattatacttcgtttacttttttttttggttagttaactactgaactgaagatactattttctttattttttttttaatgttcatgaggtgttgtgtccgtcttcgctagaacctgaattcatggttgttggttgaggacaaggctcttcactttggtgaatataattcatggttgttgacaaaaaaaaaaaaaaaaaaaaaaaaaccaaaaaaaa

SEQ ID NO: 8720 - DNA, 511 bp, Glycine max
gccaaagcatttcgctttttgctacctgtagagaagatagcatcaaatatcaaatatagagaattcatggtacattagcattggtagtaggagaccgttgaaccaaacaaaatattttatcatacacgtcaaaaggaagattatcactgctctcatagcagtgtaaatcatgataaacaaaatgaccttggaaatattagaagctttgaatcacacagttcaggttatcaaatggtgttcaacttagtctaatactcgtttctctccacgacaaaggaatgacatgccatatccagaccttgatactgccctttcttgaccctttctattctctcctgtcaaaagcatatctttcttttgactctgtttgattgctatagtttctatacgatcttttatcttgcttcctatcataatcttctcttggctttggtgcagattcaccttcactgtgctttcgtgatttcctgtcttcactgtatccatgaagttctcttgacttgcttacaat

SEQ ID NO: 8721 - DNA, 1491 bp, Glycine max
  misc_feature (1449)..(1451): n is a, c, g, or t
tcagctacgtaggcccccccccccgcattctcactattctcctcatcttcctctttttctcaaccaaaaggggttcaattctagctagttctattacatcgtccgcgaccatgaacatggcgatcgtgcttctgttcatggttttcgcagtttcatcagctttagacatgtcaataatatcacatgacaacgctcatgcggatagggccacgaggcgcaccgacgacgaggtgatgtcaatgttcgaggagtggctggtgaaacacgacaaggtgtacaacgcgctcggtgagaaggagaagaggtttcaaatcttcaagaacaatctgcgctttatcgatgaacgaaactctctgaaccgaacctacaagttgggactcaacgtgttcgctgatctcaccaatgcggagtacagagccatgtacctgcgaacctgggacgacggtccgaggttggacttggatacgccgccaagaaaccactacgtgccacgtgttggagataccatacccaaatccgttgattggaggaaggaaggtgctgttaccccagtcaaaaaccaaggagctacttgtaatagctgttgggcattcacagcagttggtgcggtggaatcactagtcaagataaaaacaggtgatctaatttcattatcagaacaagaggtggtggattgtactacatcctctagtagggggtgcggtggaggagatatacaacatggctatatctacatcagaaagaatggcatcagtctcgaaaaggattacccttaccgtggtgacgagggtaaatgtgactcaaataagaaaaatgctattgttactattgatggccacggatgggttcctacccaacttgaggaagccttgaaacagggcattgcaaatcagccagtggccgtacctattccagcagacgactatgaatttcaatattatacatcaggtgtattcaaagggaaatgcggtacagaattaaatcatgctctcctgcttgtggggtatggtacagaaaaagatggagattattggatagcaaagaattcatatagtgataaatggggagagaatggctatatcagaatacaaagaaaactgagcacttgtaaatttggaaacgggggttactatcccattataaaagtcaccgatcaacaagccaccaaatatgtgtgacaatggcatcggctagctgtgcccattgagcctttggaagtaattaataacaaggccaaaatttcaaggagactatctttgagctattttatctttatataagtattgtaatttctgttccctaaatcatctggttgctgcacgtgttggccccagattgagtatctgtttagtctatctacagtatctatctaaataaaggtgcgatggctctatgggcatcattataaatgcatactcattttgtgtttaaaaaattaaaaaaaaaacnnnaaaaaaaaaaaaaaaaaaaaaaaaaaaaaacccaaaaaaa

SEQ ID NO: 8722 - DNA, 1881 bp, Glycine max
gaaccacacactcacttatttgttccgctccccaggcccccccacaagtcacaacacacacacacatagcaatggcatctatggcggctataggttctctcaatgttccacgttctgcttcttcccgttcatcctttgtgggaagaaaaagcgttccacgcagcctttccttctctgcatcacaactttgtggagacaagattcccacagattcagttttattggcaccaaaaataggtcgcagtccagttatcgttactcctaaagcagtttctgattcccaaaactcacaaacgtgccttgatcccgatgctagcagaagtgtgcttggcattatacttggaggtggtgctgggactcggctttatccactcaccaagaagagggcaaagccagctgttcctcttggagctaactataggcttattgatattcctgttagcaactgcttgaatagcaatgtctccaagatctatgttctcactcaattcaattctgcgtcgttaaaccgacacctttctcgtgcttatgcaagcaacatgggtggctacaaaaatgagggatttgttgaggttcttgctgctcagcagagtcctgagaatcctaattggttccagggtactgcagatgctgtgaggcagtatttgtggctttttgaagagcacaatgttttggaattcttggttctggctggtgaccatttgtatcgaatggattacgagaaatttatccaagcgcatagggaaactgatgctgatatcactgtggctgcattgccaatggatgaagcgcgtgccactgcatttggtttgatgaagattgatgaagaggggcgtataattgaatttgctgaaaagccaaaaggagaacagttgaaagctatgaaggttgatactacaattttgggtcttgatgacgagagagcaaaagaaatgccttatattgctagcatgggtatatatgttgttagcaaaaatgtgatgttagacctgctccgtgagaagtttcctggtgcaaatgactttgggagtgaagtgattcctggtgctacttctattggaatgagagtgcaagcttacttgtatgatggctactgggaagacattggtacaatcgaggctttctataatgcaaatctgggaatcaccaaaaagcctgtgcctgacttcagtttctatgatcgttcatctccaatctacacccaaccacgatatttgcctccctctaagatgcttgatgctgatgtcactgatagtgttattggtgaaggatgtgtgattaagaactgcaaaattcaccattctgtggttgggctgcgatcttgcatatcagaaggtgcaattattgaagacacgttattaatgggggcagattattacgagacggaggctgataagaggtttctggctgccaaaggcagtgttccaattggtataggcaggaactctcatatcaaaagggcaattattgacaagaatgctcgaattggggaaaatgtcaagattattaacagtgacaatgtccaagaagctgcaagggaaacagatgggtatttcataaaaagtgggattgtcacagtaatcaaggatgctttaattcctagtggaacagtcatctaaacacaaccacctccccaaaaaatttcttgtaccccaaatcctaatggtgactgcgaagctcattaccaccgcaggagagtttatcaagctctgcttccacgtctaagataggcttttgtgtttcatgatatatatttttgggcagtggcttgtaaataatagcggaagagaaggcccgctatgagcaatcacgctgtaaagttcgttaatcaattcaataaaacaagtttctttatttcgtactaaaaaaaaaaaaaaaaaa

SEQ ID NO: 8723 - DNA, 1649 bp, Glycine max
  misc_feature (1634)..(1634): n is a, c, g, or t
gtttccagaacttcgacttcggatcctgcattgttcggttggccggtcagcgacgcttcttctgcgtccaaacaggtcatctggaatggactcgatggtgccggaagaagaaaggcaagcgccggtgccggagagtcttggtttgaagatctggcgcttctacggttgcctctgtttaaacgattgattctggcgatgagaactgcggagctgagtcctgagattattgagacgtgtgtgatgtggtatgcccgggtcgaccccccggccgtctcgagatcgaatcggaaaccgttaccgtcgtcatcttcttcttcatccgttgcgacggaggcggagcagaaggagattctggaggttggtttcgaatcttccgctggagaagagttcgaaggcagcgacggcgacgaggtttcttttcggattgttgcgaacgacgaacatactgaacgcttccgaagcctgcagagacgcgctggagaagaagatagggctgcagctcgaagaagccacgcttgacgaccttctcgtgccgagctactcgtacctgaacgaaacgctttacgacgtcgattgcgtggagaggattttgagtcagttcttggaaggtttagaagcgagaaccgccgcggaaacgacggaagacgcggcggcgacgaggtcgccggcgcttatgctcgtcggaaaactcatcgacggttacctctccgagatagcttccgacgcgaatctcaagccggagaagttctacaatttcgccatctcgcttcccgacgaggccagactcttcgacgacggtctctaccgcgccgtcgatgtgtatctcaaggcacatccgtgggtttcggaagaggagagagagaaaatttgcggattgttagactgtcagaagctgacgctggaggcgtgcacgcacgcggcgcaaaacgagaggcttccgctgcgcgcggtggttcaggtgctgttcttcgagcagcttcagctacgacacgccatcgccggaacgctgatggcggcggaggcagccgcggagcctgggcggcagtcggcggcgctggaacgggaagcggagggcggcggacgagaaggattagggttagacttagagcacgtgcaggaacggaacggcacgtggcgcgtggcggtgagggagaatcaggtgctgcgcttggacatggatagcatgaggacgcgagtgcatcaactggaacgcgagtgttcctctatgaagagagtcatcgccaagtttgacaagtccgacggcggcgccgccggtggttggagggcgtcgctgggccggaaattcggttgcaagtttaagactcaggtttgtgattcgcacgagtcaacggctgttgatacccgcaaaggacgccatcaccagcagcagcagccgcagcagcagcagcatccccatcatgtatagtcaccatgctaaacttcctcccctcacgtgagaatcattgttggagtaaatttcatacgggtcccacttgtaattgttcattttttttttctttaattttccataattttaatttcaattgattaatagtataataactttactttctcgaattattcggtatatgaaaatatgagatgagcttgaaattaaaaaaaaaaaaaaaatnaaaaaaaaaaaaaaa

SEQ ID NO: 8724 - DNA, 2157 bp, Glycine max
tcggattcggtcagcaaagagcttgtctttctgcgattgctctccttctttagaggacgttttggaggttgcagaaggtctttctcattcctctgtatctggtgctctgttgaaagtattgattgatgggtttgaatggcttaggaaagcattagaggggatttctggacctcgcagttctagaagatgtaagttgactgacatacaagatattcttaccgattatcagactattaatatgacctttacagcagtaaaatgtcaacttgaagatgccattggaatccagtccgcctcgcaaggcccccccccccctttttttggtctaagccctagagaacgttctttgtcttccatattgcagctcaaggaacatggagataccattgccttcagttgctctgaactggatttgattttatctgaagttgagaaggtggaaaattggaagactagatgcatggataaattaagaatgttggtccaaaatggaaattccctacttcatgcactggagaagataaaccagactctagatagatcattgtttatgtatgacaaattgcaagatctgaaggaacaaaatctatgtatatgctgctatgatgattctgaagatcaggaatttcttacatgttccacttgtatggactgctatcatctgcgatgcgttggactaacagaaaaagactcagacattgaaaactacaagtgcccttattgtgaaattttgaggggtgaattccattatcagaatggaggtgccctcctgaggtttgggaagaagcatgttgaattgaaagttcttactgaactcatgtctgatgctgaacatttctgtttatggattgatgaaagagattttttgtgccaacttgttgagaaagccctttcatgcaaatcttgcttgagagaaattgtgatccttgcatcagctaatgttgatgaagatattagcattgtctccgaaaaattggccactgctgtaaaggctagcaaagtggctattgtctatgatcagcatgatacttgtgaccttgagctgactttagcaaaaaacttttggaaaattcaagtcagtagattgttaaatggtgtaccaaagcccactatccagcaaattcagaagcatctgaaagagggactggctatggacatatcacctgaagatcactatatgttgaaacttacgaatgtgaattgcttgggtttgcagtgggcagaactagccaaaaaggtggcaactgattctggggcactcagcctggataaagtttttgaacttgtggtggtaggtgaaaacttgcccgttgacatgaacgaggaactaaggatattaagggcacgatgcatgctttattgcatttgtcgaaagccctttgatccagaaaggatgattgcatgttatcactgtaatgagtggtatcactttgattgcatgaaattgccttgcacagaagaggtctacatttgtcctgcatgtaatccgtgtaccgaaggattgccttccaaccatgacagattaactagtggtaaatttgaggagcctaaaacaccatctcccaggcattcaaaccctagaaagaaacagaagagagacgtgcccagtctcacttgcaacatgttcgctaccaggaatcaagatagtgagtttaggtattcgagtgggatagaatgtctaaggtggcaaaatcgaaagcctttcagaagagctgctaagaaacgtgttgaacttcgaagactttctccatttctatgcatacaacgatagctaagcattgtagaaatcattggtcattaaattgattcaattgatttttatggtgtcatctcggtcatttttaatccatcttaatgtgaaaatttcatttttaatttcgtgtcgtttgcatttcaccatttgaagtcttaagttattaggataaagatggcgtgaattaacgtaggaagcattagttttatacagctgacaaaagtaggtaggatttttttattttattttataggatttagttaatttttatgggggaaactagataaaacagtggtaagaatcattcatccatttttttttttggattaaatgtttggtttctgtaaataagataatgtttacatttagtttctaacaaataaattgtctccttttagagtcca

SEQ ID NO: 8725 - DNA, 1314 bp, Glycine max
  misc_feature (195)..(195): n is a, c, g, or t
  misc_feature (200)..(200): n is a, c, g, or t
  misc_feature (204)..(205): n is a, c, g, or t
  misc_feature (211)..(211): n is a, c, g, or t
  misc_feature (243)..(243): n is a, c, g, or t
acaaggaaagccctttcatgcaaatcttgcttgatataaatagtgatccttgcctcatctaatgttgatgaatatattagcattgtctccgaaaaattggccactgctgtaaaagctagcaaagaggctatagtctatgatcagcatgatacttgtgaccttgatctgactttagcaaaaaactttaggaaaatncaagncatnngatagntgaatggtgtaccagagcccactattcaacanattcagaagcatttgaaggaggaacaggctatggacatatcacctgaagatcactatatgttgaaacttacgaatgtgaattgcttgggtttgccagtgggccataactatgccaaataggtggcaactgattcatagggcactcagcctggataaagtttttgaaccttgtagtggaaagtgaaaacttgcctgttgatatgaacgaggaactaaggacattaagggcacgctccaggctttattgcatttgtcgaaagccctttgatccagaaaggatgattgcatgttatcattgtaatgagtggtatcactttgattgcatgaaattgccttgcacagaagaggtctacatttgtcctgcatgtaacccgtgtacagaaggattgccttcaaaccatgacagattaactagtggtaaatttgaggagcctaaaaccccatctccgaggcattcaaatcctagaaagaaacagaagagagatgtgcccagtctcacttgcaacatattcgctagcaggaatcaagataagcttaggtattcgagtgggatagaatgtctaaggtggcaaaatcgaaagcctttcagacgagcagctaagaaacgtgttgaacttcgaagtctttctccatttctatgcatacaacgatagctaaacataggagaaatcattggtcattaaattgattcaaatgatttttatggtgtcatctcggtcatttttaatccatcttaatgcgaaaattccatttttaatttcttgttcgcatttcaccatttgaaggcttgagttattaggataaagatggcgtaaattaacgtaggaagcattagttttatacagctgacaaaagtaggtaggattttttttttaatagaattcagttagtttttaactttttatggtggaaattagataaaacagtggtaacaatcattcatccattgttggattaaatcttcagtgtctgtaaataagatgatgtttacatttattttctaacaaataaattgtctccctttagttgttgtttaaaaaaaaaaaaaaaaaaaaaacaaaaaaaaaaaaa

SEQ ID NO: 8726 - DNA, 746 bp, Glycine max
cactgacgtgtgaccccacgcgattgctcaaaagcaagggataaacaatagtacgaggcaccgcattgttgagacttgagacttgagttatggcacttgttgaagcctatgcttctctttcaatctcttctgttgctcgtcttttcactccaccaaaatgctctcccaccgctcactttcctcatcggaattttgttgcaactcgaccatcattcatcgttggttccccactcttgattcaaagaaatcatggaaggaaagctgcatgcaaagcaatccctgttccaataagatgtgagcaaagtacccaacaagggaatggtctggatgtgtggctaggcagactagccatggttggctttgcagtagcgatcactgttgaaatttctactggaaagggactcctagagaacttcggagtcccaactccactgcctacagttgcccttgcagtaacagcactggtgggtgtcttgacagcagtttttatcttccaatcagcctcaaagagctgattacatgtttaggctggttgtgattgttgtaaattcttaagctgggaagtttcaattttcaagataaaatttatctttttgtatcctgtaatatttgtttggtggaaagaaagaattgttattaaagcccagaaaagttaatgacgccttaagccatagaataatggcgtcacctttccctgttgccttccacgatctttgttatccaaaaaaaaaaaaaaaaaaaaaaaa

SEQ ID NO: 8727 - DNA, 825 bp, Glycine max
attacagaggccacgtgggagtgtgaatgaagggttatggtggaacaagtttgagccactgaccccgcttgaacaaaagcaagagataaacattaaacactgaaaaattcgtaggaaccgcacaattgagctagttgcaagtcaccaccatggcacttgttcaaccctttgcttctctttcaatctcttttcgcgatgctcgtgttttcactgcaccaaaatgctctcccaccactcactttcctcatcggaatttggttccaactcgagcatcattcatcgctggttccccactgttgattcgaagaaatcatggaaggaatggtgcatgcaaagcaatgcctgtttcaataagatgtgagcaaagtacccaggaagggaacagtttagatgtgtggctaggccggctagccatggttgggtttgcagtagccatcactgttgaaattgctaccgggaagggactcctagagaactttggactcacaagtccactgcctacagttgcccttgcagtaacagcacttgtgggtgtcttgacggctgtttttatcttccagtcagcctcaaagaactaatcacatattccgactccttgtgtttgttgtaaattctgaagctcagagatttcattttgggagattaattttatcatccttttctgtaatatttgtttcgatgaaaagaattggcaatgaagcctgaaaaatcaaagtaactacgtgttaaatatagtatgacctcagctttccctgttgcctccaaaatccatgtcaaacgctacctttgtgaattatgttgtcctcattgccttagttgtgaatg

SEQ ID NO: 8728 - DNA, 890 bp, Glycine max
cccacgcgtccgtacggctgcgagaagacgacagaagggggccaccacaaattacatagtaactctttttctcgaatccacagagtgagactcatcgtgtgaacaacgataacggcatgtttgagcgtacttgaaaaatttgagcggccatggacgaaaccgccgtaacgacgaagcctgattggctcaacaaccgcgcgagggtcgccggagagagaaccgaagaatttttctgtggcggcgacgacgaagaggaatgcgacgacgaggcttgggacatgttgactcggagcttctggcaggcgcagactgtgctggacgagaaccgtgcgctgatcgacgaagtgaacagcaaccacgagtcgaagattcctgacaacatggcgaagaacgttggcctcattactcagatccacggtaacatctccaaggttcgctctatttactccgatttatctgtaaatttccccaacattattcgccagcgcggcgtcgccgccgtcaaccaccgcaatcgcgacggcgacgtcgaagaggatgaagatgaggcggagaactcggaggagaattccgcggagcacgtgctggataaatcggagtaattctttgtttccttacatatgttatatgattgttgttgccttgtccaatgcatcctagggtatcatgtgatgtagttggtgaaatttgaaatagaatgattcggtttgtgctagtgcctgttttagtgtgaggttgtttgagaaatctatctgtgcttattcctggttgtgcttttgtgttgtttttctttgttgtaaggatggttgaattgatggctgtgggaatgcgtagcacattatccgcccacagatattaggtatttatgtcaatgtttgattttgtttccc

SEQ ID NO: 8729 - DNA, 2042 bp, Glycine max
ggctcgagcgaaacttggttttgcggaaaaacaaagtatcacctctaacacagcatccgatattacacacatattctgcttcttcttcttcttctctctctctctctctctaaatatttttctctctcttcagcgaattcgtttttctcttcaagcttcggctatggcgtctggatcctcgggtcgcggaaactctgcctccaaaggcttcgatttcgcttccgatgacatcctctgctcctacgacgactacgccaaccgcgattccacttccaacggcaatcacaccgatccggattttcacaaatcaaggatggcaagaacatcaatgtttcctactactgcttataatccacctgaagattctttaagtcaagatgtgattgcgactgtagagaagagtatgaaaaaatatgctgacaacctaatgcggtttctagagggaattagttcaaggctatcacaattggaattatactgttacaatcttgacaaatctattggagaaatgaaatctgatataaatcgtgaccatgtggagcaagattcaaggctgaaatctcttgaaaaacatgttcaagaagttcacaggtctgtacaaattttaagagacaagcaagagctagctgagacacagaaagaattagccaagcttcaacttgctcagaaagaatcatcttcctccagccattcacagtccaatgtcagctacgtaggcccccccccagatcctaaaaaaactgacaacgcatctgatgcaaacaaccagcagttggctcttgccctgcctcatcaaatagctcctcagccgcagcctgccgcaccctcagctcaggctgctgcatcaaatgtgactcaagcccctcaacagcctccttattacattccacccacccctatgccgaattcagccttgccccagcacccccagaatcagtacttaccatccgatcaacaatatcgaacaccccaacttgtggctccacaaccaacaccgtctcaagtaaccccatccccacctgtgcaacaattttctcactatcagcagccacaacaacagcagcagccgccgcagcagcagcaacagcaatggtcacagcaggtgcagccttcacagccacccccaatgcaatctcaagtaagaccctcctctccaaatgtgtaccctccgtaccagccaaatcaagcaacaaacccatcacctgcagaaacactgccaaacagcatggccatgcaaatgccatactcgggagttccaccacagggatctaaccgtgccgatgccataccttatggatatggaggagctggaagaacagttccacagcagcctccaccccagcagatgaagagctcttttcctgcaccaccaggtgaaatgtatggacctaccgggtccctcccggcgcttcctccaccgagtagtgcatacatgatgtatgatggtgagggaggaagatcacatcatccaccccaacctcctcattttgctcaacctggatatcccccaacaagtgcttcccttcagaaccccccacaagggcataacctcatggtccgaaatccgaaccagtcacaattcgtccgcaaccatccctacaatgagttgattgagaaactggtgagcatgggattcaggggtgaccatgttgcaagtgtgatccagaggatggaggagagtggacaggccgttgatttcaactcagtacttgacaggttgagctctgtgggtcctcagagaggaggatggtcagggtgatgaagaacttttctgaacagttactttgtctaccaaactaaatactctgttcaaaccctcaaaatcattgcgtgttttattatgcatggaataaaagtttttatgtaatgtgacggtttaccatcgtatgtaaaaaatgtcttgagatgtgaggattatctagtatttttatgcagaaaatcactcgctctttttctacttattttttaacttatattttaaagaagtatatgtaactctagattattggtgatctacacgtttgctatctaaccatcaaaaa

SEQ ID NO: 8730 - DNA, 1508 bp, Glycine max
  misc_feature (22)..(22): n is a, c, g, or t
tcgagtcagctacgtaggcccnccccccacaaccaagtattcacgcaattcaagaattgaattcgttaatattttttcttctcttttatctgaatggcgaagcagaggcaagaagacgggaagaagggcgtggtcgatctcatgcctcttttcgccaaggaactcctcgccggtggcgtcgccggcggctttgccaagaccgtcgtcgctcctctcgaacgtgtcaagattctctttcagacgcgaaggacggagtttcagagcacagggttgattggatcagctgttagaattgcgaaaacggaaggccttttgggtttctacagaggaaatggagcaagtgttgcaaggattattccttacgcagctattcattatatgtcctatgaggaataccgcagatggattatacaaacttttcctcatgtttggaaaggccctacccttgaccttgtggcaggctcactctctggaggcacagctgtacttttcacttatccacttgacttgactcgaaccaagttagcttatcagattgttagtccaaaaaagttgaatgcttcggggatggttaataatgaacaagtttacagagggatccttgattgtcttgcaaagacttataaagagggtggcatcaggggtctctatcgtggagtggctccaactcttgttggaatattcccatatgcgggtttgaaattctacttctatgaggaaatgaagcgccatgtccctgaggagtacaataaaagcatcatggccaaactcacgtgtggatctgtggcagggttattgggtcagaccattacatatcctcttgaagtggttaggaggcaaatgcaggttcaaaaactcctgccatcggataatgcggaattgaaggggactcttaaatctgttgtttttattgcccaaaagcaaggctggaagcaactgttttcagggctgagcatcaattacataaaggttgttccatctgttgccatcggctttacagtttatgatagtatgaaatcatacctgagagttccatcaagagatgaagctgcagttgaaaattgaaatggtaaccaacaaaggaataagatggacatcctcgccggaataatataaaatgatccccttcccatttcagcctgctaacacccccgggacttcaaactggcttcttagtctctgtcgatttgactgttatttatacataatggtagtgcattctttcaagttgtacagcgagatggagcttatattccatcttcaaataggatactacatatacttctgtacaccttaccaaggaatgacccctttagattcgggtctcattcatttcatcatttgaggaaacatcatgtctgttgtttagataggacaaaccatgtacttataaataaaagataaattgaccaaaaaaaaaaaaaaaatagagaatcatttagaaatgttgatattaaatatcccttcactgcatttggtttattctaagcactcgccagatttctatt

SEQ ID NO: 8731 - DNA, 1829 bp, Glycine max
  misc_feature (1811)..(1811): n is a, c, g, or t
  misc_feature (1816)..(1817): n is a, c, g, or t
  misc_feature (1820)..(1829): n is a, c, g, or t
caaaaaagatccccgttggtcggccccctgcccgagctttccttccatagaaaggaatcaagatttttcccaataaactatgggtgacatctcacaaatcacctgctgattttgctgccatttcgagaggggacgaacgagacagcaacatatcatctccgaccaaatcccgttcattcaggcagtgttcatttctctgcccctcacttacttattcactcccaactccaaaaccatcatcgtcaatatggcacaagcacacgctctattttctcctttcaatcctcgccttcttccttcttcctcccccattctccgacgccgtttcttttcccttccaatttctccgttaactcaccggaccgtgattgcctccgaaaacgtcgccgtttcgcctgatgccgcctcgtctactcactctctcccccaggtcttcaattccttattcttttttatttccattcattgaaactgaaattgaaaacgccgtgcgtagcaggtgattgaaaccctgatttccggagtggatttatcggaggaggaagccgaagcgtgtctcaacttgctgctgcacgaaccaaacgaggccttaatcagcgctcttctcgtgcttctcagagccaaaggagagacctatgaagaagttgtggggttggcgagggcaatgtttaaacacgcgacgaaggtggagggtttggacgatgtggtggacatcgtgggaaccggaggggacggtgccaacacggtcaacatttcgaccggtgcttcgattctcgccgcggcttgcggtgccagagttgcaaagcaagggagccgttccagttcttctgcgtgtgggagtgccgatgtgttggaagctttgggagtggtcattgacttaggtccacagggggtgaagaggtgtgtggatgaagctgggatggggtttatgatgtctacaaagtatcacccatcaatgaagattgtcaggcctgtaagaaagaagctaaagataaaaactatattcaatatattgggtccaatgttgaatccagcacatgccccttttgccgttgttggagtatacacagaggacttggtccttaaaatggccaaagcactcaatagatttggcatgaaacgagccttagttgtccactctgaaggtttggatgaaatgagtcctcttggacctggtatagtgcttgatgttatggctgacagggttgataagtttgcatttgatcccttggagtttggcattccacggtgcaatattgaaagcttaaaaggtggtggtccagaatacaatgcagaggttttgaagcgtgttctaggtggagagagagggccaattgcagatgctttgattctcaatgccgcagcagctctcttagtcagtggctgtgtaagtaacctagctgaaggggtttctgtggcacgtgaaacacaacaatcaggaaaggctctgaaaacactcaacctgttgaaggatgtctcaaataacatcaaagatgagttgggcatggatgcctgaattgttttgtggcccaggttgtgagttttgtaaacttgattcaaacaagaggagcttggaaggcctcatatagtacatgtattattaaagagatgtacaaaaataatttaatttattattgtaaaattatttacccttcagtactgtgcaaaaaggttttagaattagttaagaaggattataatttgttttcatttatcatgtcacttgacaaagtgacataggaaatggatttttttatctgaaaaaagattgagattcgatgtaagatttcatggaccaattgttgcgaaanaaaannaannnnnnnnnn

SEQ ID NO: 8732 - DNA, 1144 bp, Glycine max
gcaagcgaggaattcggctggaggcgagacgagccgtttctaattaatgaaggacaagtggctataacactacttgcattcagttagactttgatagtttgattagctctaataaggttaaggaccagagagagaaagagaaataagaagaaaaacacaagatgggttattggaagtctaaggttcttcccaagatcaagaaggttttcgagaagaatagcaccaagaaagctgctgctgctgaggccaccaagtcctttgatgagtcaaaggaggaatacaacaaagcctttgaagaaaagaagactgaacttcaaaccaaagttgttgaaatatatgaggcttcatcaactgaaatcaagagtttggttaaagaacccaaggaagctggtttgaagaagaactccacagaagtccagaagttcctagaagagctggttaaaattgatttccctggatcaaaggcggcatctgaagcatcttcaaagtttggaccagccttggcttcaggttcagttttctttgtgtttgagaaggtgtccactttcattgttacagaagaaaaagaagttgaagcccctcctgcagtagaaactaaaacagaagaagaaacaagtagtgttgtcaaagagagggagacagtggttgaagaagaaaaaaaggaagaggaaaaaccacaagcagacgagacaagtgatgagaaaaaagtggaagaaaaacaagctgagactgctgctaaagaggaagagaaacctgctgaaccagcagaaccaccaaagccttgaaaatttcgttctgaacagaagctatatatatgtagctgcttcatgaagatgcagaagatcatatacgtgcattcttagtttgcatatagtccaaaattgtcacataccattcccttattcttttattcctgtgtaaaattggttttgtgctgcttagtttgatattgttgcagatttggtgattgatatgcatgtcaattaatgtttttatgatgaatcgttttgtaatattattcatttttcagtcaaggaattgtgacgtttagtttggttcatcgaaaaaaaaaaaaaaaaaaaaaaaaaaatttaaaagttatcagtgccattatggaagtcctgtttggcagggttttacattt

SEQ ID NO: 8733 - DNA, 2233 bp, Glycine max
atctgataaataaaatcccacaggtaagggtaataaacaaataacagaagttagaaaaaaaaaaaacagattggcagccacgtgtcccagggatgaacatgattgtggagcgagcgagtgatgctcaccacatcacgtgcttccaaaactgatctatttcccttagctacgtaggcccccccccctctctgctgcaaatccaaaatctaccatagcggttccattttctgaatttctcgagcgaacttcgcccagttctagggttccccactgccatgtaccaggccgaattaacctccgaacaggttctgaggagggacatcccatgggagacctacatgtccaccaagctcatctcagggacgagccttcagctcttaaggcgctacgatcaccgaccagaaagtcacagagcacagttgctcgatgatgatggtccctcttatgttcgcgtgtttgttcgtgttttgcgtgacattttcaaggaagatactgtggagtatgttttggcactgatagatgaaatgcttgctgcaaacccgaagagagcaagactgtttcatgatagtgcccttgctgatgaagatacttatgagcctttcctaagattgctctggaaaggaaattggttcatacaagagaaaagttgtaagatccttgctttagttgttagtgtcaggccaaaaaatcagaatggcgttgtgtctaatggagaagcatcaaatggaaagaagccatttaccactattgatgatgttttaataggattggtaaaatggctttgtgaacagttgaagaaaccttctcatcctattcgtggagtcccaactgctatcaattgcctagcaacactacttaaggaacctgtggttaggtcttcctttgttcaggctgatggggtcaagttacttgtgcccttgatttcgccagcatccactcaacagtcaattcagcttctttatgaaacatgtctctgcatatggctcttatcctattatgagccagcaattgaatatttggctacttcaagaacccttccgcgacttattgatgttgtcaggagttctacaaaagagaaggtggttagagttgttgtcttgactcttaagaatttgatgtcaaaagggacattgggtgctcagatggttgaccttcagctggcacaagttgtcctgagtttaaaagcacaagcatggagtgatgaggacttgttggaggccctgaattccttggaagaagggcttaaggataatatcaagagactaagttcttttgatatgtacaagcaagaagttctccttggccatctggattggtctcccatgcacaaagatcccatattctggcgagaaaatataaacaactttgaagaaaatgatttccagattctaagggtcctactaacaattttggacacgtccagtgatccaaggactctggctgttgcttgctatgacctttcacagtttatccagcatcattctgctggacggatcattgtgtcagacctcaaggcaaaagaacgagttatgaaactaatgaatcatgaaaatgttgaagttactaaaaatgcactgctctgcatccagcggcttttcttaggtgcaaagtatgcaagcttcttgcaggtttaatgctgtttctgtggggtggtcaagatgcacttaattccatcaacttcactgctagctcacaaattggatcggctctcgtatacaaccattattcattgttttaatgattaatttattgtgtatgactactaagatttcggtttcaacagtagaagaaattttatgtgaggaataagtatgcatgatattctgctgctgaataaatcaagttttgtaatgtactcgaagttgtgcttgtaggtatgttgaatttgttagaaaacaaaatttatcgttgatatggatatatgtattttcttgaatatgagctagtttcagaagaataatgacttgaggaataagtaagttattgtcctattgacctaaaaaaaaaaaaaaaaaaaaaaaaaaaaaaaaaaaaaaaaaaaaaaaagggggcggccgaacaactagagcgctccgacacccggaattaaatcccgccccggtccctggggggctcccatctttcctttttaagaggcgatatcccccttggcgacaccagggccaaagcttttcactgtgcaaaatggttgccctcccaaacttcccccccaaatgcaaactgaaatgataag

SEQ ID NO: 8734 - DNA, 3058 bp, Glycine max
ccacgcgtccggctgcaggtcaggctgcagcttacaaaatgtttcagacaattgaaaggaagcccgtgttagatgcttatgatccaaatggaaaaatattagaagatattcaaggcgaaatagagttgagggatgttgatttcagttatcctgcaagacctgaggaactgatatttaatggattctctcttcatataccaagtggtacaactgcggctttagttggacaaagtggaagtggaaagtctacggttatcagcttggtagaaagattctatgatccacaggcaggtgaagttcttattgatggcatcaacctgaaagaatttcagcttaggtggattagaggaaaaattggccttgtcagccaggagccggtgtctgtttgcatctagcattaaggataacattgcatatggaaaggagggagcaacaattgaagagataagatctgcatctgaacttgctaatgctgctaaattcattgataagcttccacagggattggacacgatggttggtgagcatggaactcagctgtctggtggacagaagcttcgcattgccattgcaagagcaatcctgaaaaatccgagaattctacttctggatgaagcaacaagtgcacttgacgcagagtctgaaaggatagtgcaagaggctctagacaggatcatggtcaacagaactactattatagtggcgcatcgcttgagcacagtgaggaatgctgatgtgattgctgtcattcatagagggaagatggttgagaaaggaacacacatagaattactaaaggatcctgagggagcttactctcaacttatacgcctacaagaagtaaacaaagagacagaaggaaatgctgaccaacacaacaacagtgaactttctgtagaagcctttagacaatctagtcaaaagagatcacttcaaagatctattagtagggggtcatccttagggaatagtagccgccactccttttcagtttcctttggtttacccacaggagttaacgttgctgatcctgaacatgaaagctcacaacccaaagaagaagcaccagaggttccactcagccgccttgcttccctcaacaagccagagattccagttcttgtgattggatctgtagctgccatagcaaatggggttatatttccaatatttggcgtgctgatttccagtgtcatcaagacattttatgaaccatttgatgagatgaaaaaggactccaagttttgggcactgatgtttatgatccttggtcttgcatcatttcttataattcctgcacgaggatacttttttgcggtggcagggtgtaagttaatccaacgtatcaggcaaatgtgttttgagaaggttgtcaacatggaggttagttggtttgatgagcctgaaaactcaagtggtgccattggtgcaaggctctcagcagatgctgcttctgttcgtgcccttgtcggtgatgcgctgggactattggttcaaaatttcgcaactgtactggcaggtttgattattgctttcgttgcatcttggcagctggcattaattattcttgtcttgattcctctgattggagtaaatggatatgttcaaatgaaattcatgaagggattcagtgcagatgcaaagatgatgtacgaggaagcaagccaagttgctaatgatgcagttggaagcataagaacagttgcttctttctgtgctgaagacaaggttatggaactatacaagaataaatgtgagggccccatgaaaacagggatacggcaagggttgatcagcggatcaggatttggggtttcatttttcttactgttttgtgtttatgcaaccagtttctacgcaggagctagacttgtggatgctgggaaggcaacattctcagatgttttccgggttttctttgcattaactatggcagctattggagtttcccaatcaagctcctttgctcctgactcaagcaaagccaagtcagctactgcttccatatttggaattattgataagaagtcaaagatagatcctggtgatgaatctggtagcacactggacagcgttaagggagaaattgagcttcgtcatgtgagcttcaagtatccttctaggcctgatatacagatttttcgagacctcagcttgactatccattctggcaagacagtggctcttgttggtgaaagtggaagtggaaaatcgacagtgattgccttgttgcaaagattttataatcctgattcaggccaaatcacacttgatgggatagaaattcgtgagttacagctcaagtggttaaggcagcagatgggtcttgtaagccaagagccagttttgttcaatgaaactatacgtgccaatattgcctatggaaaaggaggtgatgctactgaagcagaaatcatagctgcagcagaaatggccaatgcacataaattcattagtggcttacaacagggttatgatactatagtgggagagagaggaacccaattatctggtgggcagaagcaacgggtagcaattgctcgtgccataattaaaagtccaaagatattgctactagatgaggcaacaagtgcattagatgctgagtcagaaagagttgttcaagatgcgttggacaaagtcatggtgaacagaactactgtggttgtggcacatcgtctatctacaataaaaaatgcagatgtgattgctgttgtaaaaaatggagttatagtggagaaagggaagcatgaaaagctcattaacatcagtggtggattttatgcttccttagtccaacttcacacaagtgcctcaacagtatgagttttgcctaattccaatcttcctttttttttggttcttttttgtactatgcttctttattctatattttttagaaattcaacagaagattataccaaatatttgtttcccccttcttgtaagaaatttattcatgttgtcaataacaacagataaccaaaaatatgcgagaacgatggaatatatcttgcaatattttgatagcaatatagcaaaaatttaccattaaaaa

SEQ ID NO: 8735 - DNA, 1986 bp, Glycine max
  misc_feature (1970)..(1971): n is a, c, g, or t
  misc_feature (1977)..(1980): n is a, c, g, or t
  misc_feature (1982)..(1983): n is a, c, g, or t
  misc_feature (1985)..(1985): n is a, c, g, or t
tcgagtcagctacgtaggcccccccccccaaacctcaaaagtttgcccaaaaccttatctgacttaacttccacactgtctgtctctttctctccatctttgtgtcacatgaaatttgttctctgaatttttatttttttgacatcatttcaatggcagccatcatcccctgccactactgtgcttccctcagtcctagatggttcaattccaacaacacacattctaggcgtttatcctacccacttcgaggactccgaggtttgaatgctcgttgctcttaccaaccaccccatcattctgaatctccgaacaaccataatgggaggtcattttccttgaagcagtgtgcaatatctattgcactggcggttgggttaataacaggagttcctacattggagggtcccaccattgcccaagcagctaatcctgcattgtctgatctgtctgttttgatttctggacctccaattaaggatcctggggcattgttgagatatgctcttcctattgacaataaggccattagagaagtgcaaaaaccacttgaagatatcacagagagtctcaagattgctggagtcaaggcacttgactctgtggaaagaaatgtgaggcaggcgtctcgagctctgaagcaagggaagactttaattgtatctggtttagctgaatcaaagaaagaacatggagttgaactgcttaacaagctggaagctggtatagatgagcttgaactgatagtacaggataggaatcgagatgcagttgcaccaaaacagaaagagcttcttcaatatgttggaggctgagatgttcctggggcattgcatttctgcagtgttgaagaagacatggttgatggcttcccatttgaagtacctgaggaataccaaaatatgcctttattgaaggggagagcagcagtggatatgaaggtcaaggttaaagacaatccaaacctggatgaatgtgttttccacatcgttcttgatggttataatgcccctgtaactgctggaaattttgttgatttggtagaaaggcacttctatgatggcatggaaatccaaagagcggatgggtttgttgtccaaactggtgatcctgaaggacctgctgagggttttattgatccaagtacagagaaaatcaggacaataccattagaaattacggtgaatggagaaaaggcacctgtttatggatcaactttagaggagcttggtctatacaaggctcaaacaaagcttccctttaatgctttcggtacaatggcaatggcaagagatgaatttgaggacaactctgcctccagccagatattttggctattgaaagaaagtgagctaactcccagtaatgccaatatattggatggtcgatatgcagtctttggctatgtaacagaaaatgaggattacttggcagacctcaaagttggtgatgtcatagaatccattaaagtagtttctgggctggataatttggtaaatccaacctacaaaattgctggctagttctgtgtttttgctatcaaataccgcatgagtgtttattggcacttgcttcaaggctattcaggaatgctggctattacattgtaaagttcactccccctagtttgtttccattgctattggaaaagccattattcattttactagaacctagcattcagttaaacagcttgagattttattctgtattaagactattcaccaccccggcttgtaactttcattctaccaattcatgaataaaattatgattgttcagtgaggaaattgtaggtcatactcatacagtttctgacattcatgtactggagttattcttatctgaagagagaattatttcaatttaaaaaaaaaaaaaaaactccaacattaaaggaacaacactcaagttagcacaagaccaaaagccttgtgacggttattttagctagtaatgtgacacaaatnnacatannnnanncnc

SEQ ID NO: 8736 - DNA, 733 bp, Glycine max
gacttggggtttgcttggggaacatgttgcctgattggctgtagtgtgcagcgtcgaactggaggattggttacgtggaggtcaggcagtgttatgatggtgtatcgtggtattgattaccaagggcctgactcgcggaaggaacttaatgagaagaaaggtgatggtttttttgtgccggatgtctcgaaaagggaagacagtactgcaacctcaacctcagagaagagtgaggtggttgtgagggagcgagaacatccggagaatatgtcagaggcagaagcagagtacaatgccctccttgatggtttaggtcctcggttttttggatggtggggtacagggattcttcctgttgatgctgatttgcttccccggacagttccaggttacaaaacaccttttaggcttcttcctactgggatgcgttctcggctaacaaatgcagagatgaccaatttaaggaagcttgcaaaatcacttccttgtcattttgccgtagggagaaatagaaatcaccaaggtctggcatgtgctattcttaagctttgggagaaaagtttagttgcaaagattgctgtcaaacgtgggatccagaacacaaacaatgaactgatggctgaggagctgaagatgttaactggagggaccttgctgctaaggaataaatatttcattgttatataccgtgggaaagactttgttccaacaagtgtggctgcagttttagctg

SEQ ID NO: 8737 - DNA, 1618 bp, Glycine max
caaaaaagtaatttgctgaaaattcgtcctcaacaaccaaaagcagcctccaccattcaaataccatccccaactctaaaaaacatagctcgattctgccatcacatcctccgaatacaaaagtttaccttgcaaataaatcaacaccaaacgcgcccacaacacacacacagagacatttttctttcttagaagcgtccaccacacggaacctcgcaattccttcacacccaccataataataatatcttcattgttcttttcttctttgttaccattaaaaacacacacacacacacacacaacaacactctgaaactaacaacaacaataaaagaccatgtcggtgaaggagtgcgagcaccacaaggggaagaagaggaagatcttccggcaagtgttctggtgcttagtggtgttccttttcatcgtgctggtcacaattcttttgatatgggcaatccttagacccaccaaacccaccttcacgctccaagacgtcaccgtctacgccttcaacgccaccgtggcgaacttcctcacttcgaattttcaggtcacgctcatctcgcgtaacccgaacgaccgcatcggtgtttactatgatcgcctcgaaaccttcgtgacctaccggagccagcaggtcacgtaccgaaccgccatccctccgacatatcaaggccataaagagatcaatgtttggtctccgtttgtttatggcaccaacatccccgtcgcgccgttcaatttcctcggcctcagccaggaccagagtaacggtaacgtcctcgtcaccatccgagccgagggtagggttcgttggaaggtcggcaccttcatctccggccgctaccacctctacgtccgctgcccggcgttcatcagctttggaccccgcagcaatggaatcgtcgtcggagagaacgccatcaagttccagattatccaacggtgctccgttagtgtctaaacttaatctcagacaagaaaaatgttaataacatattttctaatacactcttttaaatatgtttattagtgacggaatttagtgatgtattgccttttcgtcactaattctaaagttacaaaaactttagtgatgaatttttcaaaagttacatatgaaatatttcgtcactaaaatttattgaaaattaaatctggaaaattcatggttattttttttatgtgattttatagtttttaataaatttaaactaatcataaaaaatgtgttaaaatgagtgtaataaagaatatgttattgacacttgtggtatgtatactctactcgatccgatccagtgtatttttataggtaccaatttcttcttccactgttgttattgtacgtgtaccttgtgtacgaattggtcgttagatgtttctattttacgttttgctatagaaatgtgaagcagacaaaagagtctcagatatagcaaaattacaagatgcaagatggagactaaatgtaattgagctacgatggcaataaaatttcttgtttcaatttggataacaaatgagatgagagtgtgatgaaacgtccacacggtgtcgtgttcttgcgttttctcaataatattcttgtgctattcgcgttaaaaaaaaa

SEQ ID NO: 8738 - DNA, 1342 bp, Glycine max
tcgagtcagctacgtaggccccccccatttattcctcttcttcttcttctcatcctcacaaatacaattatacaaacacatattcattctcctcacataccaaaaataaattatttttcttgttattttccctttgctaacggaaagccatgaaattcgggaagagcctgagcagccagatcgagaaaaccctgccagagtggcgcgacaagttcctctcctacaaggagctcaagaagaagctcaagcaattcgaccctcccgcccccgcctccgccgccgatgaacgccccggcaagcgcctcaagaccgacgccggcaacgccgacgccgacgccgtttccgacgcctccgacatgtcgaaggaggagagcgacttccggaacctgctggagaatgaactcgacaaattcaacaccttcttcgttgagaaggaggaagagtacattatcagactcaaggagttacaagatagtgtggcccaagttaagggttcgcgggaagagatgatgaaaatccacaaggaaattgtggatttccatggagagatggtcttgctggaaaactacagtgccctcaactatacagggctagtgaaaatacttaaaaagtatgacaagagaaccggtgctctcattcgcttgcccttcattcagaaggtcttgcaacaacctttctttaccactgacttgctctacaagcttgtaaaggagtgtgaaacaatgctggaccaccttttccctgtgaatgatcctgctccagtttccactgagacaactccccaagctgaaggttttgatccttcaacttcaaccactaccaagagtgatggtttggtgattccgaaggaattagctgagatcgagtacatggagagcctttatatgaagagtactgtatcagcattgcatgttttgcaggaaattagaagtggaagctcaacagttagcatgttttcattgccaccgttgaagataagtggttcagaagaagaaacatggaagaaaatccctgttctggaacaagcagccaagtaacctgctgggttacgttgctgagtaatgtagagggatggctattttcccatctatttttcttctcttaaatcggacgcctctgttatgcacgccttagatactaacacagatgtaagatgctaaatgtaaagatggagttaattttatagaattataggttccatataataaaacctctggattttaaagaaagtaaggtttgaaattttgccggacgcacgtattcagtaagtaatgcaaattatatattccatttctgtttcaaaaaaaaaaaaaaaaaaaaaaaaaaaaaaaaagggcggccg

SEQ ID NO: 8739 - DNA, 1055 bp, Glycine max
ccacgcgtccgattttttgtaggaataatcaatcatggtaaaaaaaaaaagcgtaggtcagctacgtagccccccccccaaaacacaccttctctattttaagtaattcaatggcttacactgcaagtcttgtgttcttagcttccactttccttatcataaactttcctcttctggcaaacgctatcggatgcaatggaccatgcagaaccctcaacgactgcgacggccaactcatttgcatcaacggaaggtgcaacgacgaccgcgacgtcggaacccacatctgcggcggcggaatgccgccaaatccgccaccaagcggcggaagctgccagtcctcgggaaccctaaattgcggcggaaaatcgtatcctcagtaccgttgctctccgccggtaacttcctcgacgccggcgatcctgacgctgaacgacttcagcgaaggcggcgacggaggggacccgtcgcagtgcgacgagaagttccataacaacacggagcgtgtggtggcactctccacggggtggttcaacggcagttcgctgtgtttgaaaatgataaggatcacggcggggaacgggaggaacgtgacggcgaaagtggtggaccagtgcgactctgttaacggctgcgacagggcacacgcgggtcaaccaccgtgccgtaacaacatcgtggatgggtcacaagccgtgtgggatgcgctgggacttgactctgacgtgggagaagcgcgcgttacttggtccatggcttgaatcaaattttaaccactaaacaagaaaaatgaataatgaacaaggatcgacaagcattatatcatatggcttgttttcttcttaatttgcgctttttattttgtttttgttaccaaaaggatgggaaatgaaatgctcacatgcatgaacattccattctttgctttggttttaaataataataaaattatgctgatcactgcagttatgcactcatttgatatattttgctgcctcaacacatatatatgttgaacactatttgctggtcctgctttctatatttctcttctt

SEQ ID NO: 8740 - DNA, 1138 bp, Glycine max
ggaccggtggcgaacccagtttgagcgctatttttgtttgtgttcccagcgaaagggcaaaacaaagtataagaccttgctttgatttgcttcccttttcttgttgtcgtgtcaaccatggcgtcgtttgggtctctgaaatccaccattttcgaaaaagaagagagaaaacagcagtatcagtcgcatattcgaggcctcaatgcatacgaccgtcacaaaaaattcatggacgattacgttaaattttatggaaaagaaagaccgtcaaacctaaagttgcctattaaaacagatcaagatacactaagagaaggatacagattcatccggtcagaggaagatgatatgaatccatcttgggaacaaaggctggtgaagcgttattatgacaagctttttaaggaatactgcctagctgacatgtcacagtacaagagtggtaagattggtctcaggtggaggacagagaaggaagtcatatctggcaagggacagttcatatgtggtaacaagcattgcaatgagaaagatgggttagcaagctatgaggtgaacttttattactttgaagctggagaaaacaaacaagccctagttaaattggtaacatgtgagaggtgtgcattcaaactcaactacaagaggcagaaagaaaaggagcagttagaaaaaagacaacaagaacaggataggcgaaagaggaatcgttcaaagagtgatgatgatctagatgacttccaagaaagcaaagagagaaggcggaaagggaaaagggctttgacttcagccagtgatcataaaattgatgatgatgatgataacttggatgagtttcttgaggggatgtttccatgaccttggctgtttgattgtcatacctgaaaagtgcttctcagcaccaaagctgggcaaatagaaaaggttaggcagtggtggagacaagtttatgatctgcagtagatgcctaaaatataggaacataatgaccatgaatgctttttgacaaaattattccctgttgtaccttccaaaattgtttccatttatgcagactataaattgtttaacatgctagttgagttttgtattctgtacagctcgtatagtcttttcatctgtcaataatgaaaagtgc

SEQ ID NO: 8741 - DNA, 1205 bp, Glycine max
tcagctacgtaggccccccccccgatactcttgacaattacaactaccttcgcttctgtatttacattttctccttaaactcattcttcgcactcttgcattgcctccacctccttttctccatttatagtataatggctgctgaagtatattaccaggctattggtactttgcagtcccattcttatctgaataatttaaatcatcaccaaaagcatcaaaacaatttagtaacattggtgtctagggattttatcagcagtaatggcttgtcaacgagaagaagtaactgcactggccagaggaattgtagtgtaattcgatctctagcttcgcaaacatcagtcgttgatccagtgttgtccccttcaagaagcaatgctggtgacacttacaagaaatcaaatgaagcagctttaatccttattcggcatggtgagtcgttatggaatgagaagaacttattcacagggtgtgttgatgtccctctaagcaagaagggtatagatgaggcaattgaagctggaaaaagaattagcagcattcctgttgatgtaatatttacatcagctttgattcgtgcacaaatgacagccatgcttgccatgacccagcaccgtcgtgggaaggtccctatcatgatgcacaatgagagtgaacaagcaaggtcatggagtcaagtgtttagtgaagatacaaaaaagcagtccattccagtcatagcatcttggcaactaaatgaaagaatgtatggggagctgcagggtctcaataagcaagaaacagcagacagatatgggaaagaacaagtccatgagtggcgacgaagttatgacatacctcctccaaatggtgaaagtttggaaatgtgtgctgaaagggcagttgcctatttcagagaccaagtatgtggtagtttagaattttgtaatctggcaatctccctttcttcattttctccttttatgctattcttcatggtctatgattataatagttaacaagtcagtattatgtgtgttaaaatttgatgttatagcatctatattctatatggagctgattccatgacattatactgcagattgaacctcaacttttatctggaaaaaaatgttatgatttcagctcatgggaattcactgacatccattattatgtatcttgacaaactaacttcccaaaaggtgattagtttagaattg

SEQ ID NO: 8742 - DNA, 1441 bp, Glycine max
ctcgagccgaatcggctcgagtacggctgcgagaagacgacagaagggggacgatacaagggtagggtattatgagctacggagggccccccccccataaacacaaacacaagcactgaattgagttcactgtccacaagtttcgccccaacactcaactcggctcgtcgctattgttgttgttcttcttctccatatcaaacaaagtatagataaaatatcattgcagcttcattttcatcctccaattaattagcaatggggcacacatcccttttcactccctcttcctctcttaggttcaactctcttcttgtttcctccaccccctcttcttcttcacgctccaacagcgtttctttccccgccctctccaggaacataaggaaatcggtagaagatagaaagattaataaaaattctgctgtgaaagcagtgtatggtgatgaattttggacacctgcgaggagttcacctcaggatatttggtccataaggagtgatttgcaagtcccatcttccccttatttccctacctatgcacaaggacaagggccaccccccatggttgcggagcgtttccagagtgttataagtcagcttttccaatacaggataatccgttgtggtggagcagttgatgacgatatggcaaacatcatagttgctcagctcctgtacctcgacgctgttgatcctaacaaggatattgtcatgtatgtaaattctccaggagggtcggttacagctggaatggctatatttgatacaatgaggcatatccgacctgatgtgtctactgtttgtgttggattagcagctagtatgggagcttttctgctgagcgcagggacaaaaggaaagagatacagcttgccaaattcaaggataatgattcatcaaccgcttggtggtgctcaaggagggcaaactgacatagatattcaggctaatgaaatgctgcatcataaggcaaatctgaatggatatctcgcctatcacactggccaaagtttagacaagatcaaccaggatacagaccgtgactttttcatgagtgcaaaagaagccaaggaatatggactcatagatggtgtcattatgaatcctctcaaagctctccagccattagaggctgcagcagaaggtaaagaccgggctagtgtttgaacatgagaatgttgcactttaatttccaaggtataaaaaatcatagtgttagactgtaagatgtttttggttgctgagtccaacttaatttttttttacggatgttgatacctgtgcccatgtaccaaaaatgaggcgaaattgatactatttatttaatattcactgcttcagagtttatactgacagaaggttctttaatggaacctgaatgtgattttaacttcaagcattcttttgtgatgaactgaaaaaaaaaaaaaaaaaaaaa

SEQ ID NO: 8743 - DNA, 1354 bp, Glycine max
  misc_feature (1162)..(1162): n is a, c, g, or t
  misc_feature (1177)..(1177): n is a, c, g, or t
  misc_feature (1180)..(1180): n is a, c, g, or t
  misc_feature (1182)..(1182): n is a, c, g, or t
  misc_feature (1196)..(1196): n is a, c, g, or t
  misc_feature (1216)..(1216): n is a, c, g, or t
  misc_feature (1234)..(1234): n is a, c, g, or t
  misc_feature (1238)..(1238): n is a, c, g, or t
  misc_feature (1248)..(1248): n is a, c, g, or t
  misc_feature (1252)..(1252): n is a, c, g, or t
  misc_feature (1255)..(1255): n is a, c, g, or t
  misc_feature (1265)..(1265): n is a, c, g, or t
  misc_feature (1277)..(1278): n is a, c, g, or t
  misc_feature (1288)..(1288): n is a, c, g, or t
  misc_feature (1290)..(1290): n is a, c, g, or t
  misc_feature (1292)..(1292): n is a, c, g, or t
  misc_feature (1294)..(1294): n is a, c, g, or t
  misc_feature (1298)..(1298): n is a, c, g, or t
  misc_feature (1307)..(1307): n is a, c, g, or t
  misc_feature (1309)..(1313): n is a, c, g, or t
  misc_feature (1315)..(1321): n is a, c, g, or t
  misc_feature (1323)..(1326): n is a, c, g, or t
  misc_feature (1331)..(1331): n is a, c, g, or t
  misc_feature (1334)..(1334): n is a, c, g, or t
  misc_feature (1340)..(1342): n is a, c, g, or t
  misc_feature (1344)..(1346): n is a, c, g, or t
  misc_feature (1352)..(1352): n is a, c, g, or t
ttttcttcctcgcgtccgctcaagccactcctcactggaagtcgaagtcttcgcttgccaattgcatttcttctcagcttcttgctgcttccgcgaatggcccgaaacctaggaggattactggcgctacttttcgctgtttcgatctgcggagccgtcacgattcccggccccgtctccgatgctcaccgttccgccgcgttagagctcttcgatggatcgttttcaagtttagaagaggcctatgaggcactaagagtttttgagattcttacgattgggaataagcctgatgtgagcacaacgacttgcaagaaagtagtggaaaaccttgggtcgtcatcgcctgtgaaggatttgttctatgcgttaaaggttaatgacatattaaaatgcaaggttaatggggatgttttcaaggatattgctttgagacttaaagccactgtcaatgatgcgagtactttggttgagatgtactattcaataggaagtttggttcttataaaggaccaggcttctgatgttgatgtgcttcttactgatgccgatggatccttccattcaatcaaggctctgagccaaagtgatggaaggtggcgttatagttctaataatccagagtctagtacctatgctgctggattagcacttgaagcacttgctggagtgatctcattagcatcttctgaaattgatcagtctagggtgaatacagtgaaaaatgatatattgaagcttttcgacagcattgagaaatatgatgatggaacattctattttgatgagaaatttgttggtggacgtgagcatcagggttctctttccacaacttcttctgttgttcgaggggttacagcatttgctgctgtaacttctggaaaaataaatcttccaggggataaaatattgggtttagcaaattttttcctgggaattggaatcccaggagatgccaaggacttcttcaatcaagttgaatcattagctcttctagagaacaacaaggtttcgatcccattggtactgtcacttcctgcaacggtttattcattatccaaaaaagatcagctcaaggttagggtgaacactgtacttggttcagctgcaccacctttaacagtaagcttgtgcgagctttccgctctgccgctaagaatcnctttgagacaagacntcntngtcaaatatggatncttcttgaacttcccaacangaatgtggacttgtttcntttnaatgctccantctncgngaaaagcttntccggtgcattnntccttatggntngntntaanccgctccantnnnnngnnnnnnngnnnntaccnacncttttnnngnnngtttcncg

SEQ ID NO: 8744 - DNA, 1697 bp, Glycine max
atctcattagcatcttctgaaattgatcagtctagggtgaatacagtgaaaaatgatatattgaagctttttgacagcattgagaaatatgatgatggaaccttctattttgatgagaaatttgttggtggaagtcagcttcgtaggccccccccccagggttctcttcacaacttcttctgttgttcgaggggttacagcatttgctgctgtaacttctggaaaaataaatcttccaggggataaaatattgggtttagcaaattttttcctgggaattggaatcccaggagatgccaaggacttcttcaatcaagttgaatcattagctcttctagagaacaacaaggtttcgatcccattggtactgtcacttcctgcaacggtttattcattatccaaaaaagatcagctcaaggttagggtgaacactgtacttggttcagctgcaccacctttaacagttaagcttgtgcgagctttccgctctgatgctaaagattcagctattattgagagcaaggagctccaatatgatcaaaataatggaattcatgtcttggaagctttcccaaacaatgtggatgtgggaacttatgcgtttgtttttgagattgcacttcatgattctgctggtgaaaaagtttatgctactggaggccaaattcatgtaccaatatatgtcactggcattatcaaagtcagcaatgcggaaattgctgttcttgacagtgatcttggaagtgttgaaacccaaaaaacgctagatttggctggaaatgatgttgtttcactctcagctaaccacttgcaaaagttgcgcttttctttccaattgacaacacctcatgatcatgcttttaagcctcttcaggcatttttcaagttgaagcatgagacaaagcatgaacacatctttgtggttggaaatactggcaagaagtttgagattattcttgattttcttggtttggtggagaaattttattacctctcagggagatatgacattgagctgactgtcggggatgctgtcatggagaactctttcttatggctgcttggtcaagttgatttagatcttcctgaagcacctgagaaggcagcccgtcttcctccactccctgttgatccttactcaagatatgggcccaaagccgagatagcccacttattcagggctccagaaaagcgaccaccccaggaactctctcttactttcttgggtttgacccttctgccatttattggctttttggttgggctgttacgcctgggagtgaacttgaagaattttccttcttcagcagtacctgctgcatatgccatcttattccagcttggcattgccactgttctattgctttatgtacttttctggttgaagctggacttgttcactacactcaaaactgtaggatttttgggagcttttctgttgtttgtgggacacagaattctttcccatctcgcgtcaacatcatccaagttgaagtctgcataagtaaaaggaagattgtctatttataaagacatgacatgataatgtgtttttccttgaaaaaatggtaccaatccaattttgtaggactttgttgtactagttcgtgcgaatttagagctcaattatatcaagagaaaagttttatcttgatcttgccttatcttaatgaaagtcattgacataccactatgaa

SEQ ID NO: 8745 - DNA, 1103 bp, Glycine max
tcagctacgtaggccgaccttacagcacatcaatacatcttcaaatccacctctcatctctctcgccctctctctcacatcatcaccatttcacctatttttctctctctctctctctctctctcgcatcacaatttcatcaaaaccttttaagtcttcatagttttccttctttctttctttgtgaaaaaacaaaaagtccaaaccatggctcagaaaaccgagaaagaagaaaccgacttcaaggttcccgaaacgattacgctttgcgttaacaactgcggcgtcaccggaaaccctgctacgaataacatgtgtcagaagtgcttcaccgccttcaccacctctaccgccaccacgtccggcgccggaggtgccggaatagcttctccggctaccagatccggcatctccgcgcgtccactgaagagatcttttcccgaggagccctcgccgccggcggatcctccgtcttcagaccagacgaccccgtcggaggcgaagcgcgtggtgaaccgctgctccggctgcaggaggaaggtcggactcaccggatttcggtgccgatgcggcgagctcttctgcgccgagcaccggtactccgaccgccacgactgcagctacgactacaaagccgccggaagagaagccatcgcgagggagaatccggtgattagagccgcgaagatcgtcaaagtctgaaaaaaaacaaaaaagaaggaaaaaacccgaacggaacggaatctcaaaacgacgtcgttgacggttgacctttcgcgcgatcgggttcaggtcacgggtttcgctttttttcttttcagatttatatatagagagaagaaaaaaaaagtagcagataacaggtttgagagagagagagagagagtgtgaggttttagattgagagagagagcgagagagagagattgttgctgaaaagaagatgaagaagaatttatctgaatttctcttgtgttcatcgatcaaactctgatcgtttaatttttttttaaattttctcttctaattttatgtttaatttcttcctgatttgatcttgaaatgataaattattgttgtttaccaaaaaaaaaaaaaaaaaa

SEQ ID NO: 8746 - DNA, 1130 bp, Glycine max
ccgctcgcggccggccgggccgcgatactacgccagaagagctcggccggcccccctccctcgggggcccagactccattccctttaccgacctcacagcacatcaatacatcttcaaattcccctcttctctctctcacatctcttcgtcctctctctcacatcacaatttcataaaaaacctctttttaagtttcttgcttctttctctctgaaagaaaattgaagtcctaaccagttggctcttttgttttatcgttctccatggctcagaaaaccgagaaagaagaaaccgacttcaaagttccggaaacgattacgctttgcgtcaacaactgcggcgtcaccggaaaccctgccacgaataacatgtgccagaagtgcttcactgcctctaccgccaccacttccggcgccggaggtgccggaatagcttctccggcgaccagatccggcgtctccgcgcgtcctcagaagagatcttttcctgaagagccctcgccggtggcggatcctccttcttcggaccagacgacgccgtcggaggcgaagcgcgtggtcaaccgctgctccggatgccggcggaaggtcggactcaccggattccggtgccggtgcggcgagctcttctgcgccgagcaccggtactccgaccgccacgactgcagctatgactacaaagccgccggaagagaagccatcgcgagggagaatccggtgatcagagctgcgaagatcgtcaaagtctgaaaaaagaaaaaagaaaaaaaaaaaaaaaggaaaaacccgaacggaacggaatctcaaaacgacgtcgttgacggttgacgcggtttcgtgtttttttttttctcagatttatatatatagagaagaaggaaaaaaaaagtagcagatgacagatttaagagagagagagagagcgtgtgtgaggttttagattgagagagagagagagagagagagattgttgctgataaaagatgaagaagaatttatctgaatttctcttgtgtttcatcgatcaaactctgatcgttttttttatttatttaatttctcttctaatttttatgtttgatttcttcctgatttgatcttgaaatgataaattattgtgatttaccatt

SEQ ID NO: 8747 - DNA, 1431 bp, Glycine max
gagcgttatgggttgccatctcacacaccctctcctatatattgttcagctacgtaggccccccccccaagatcatccatccatcttctcataagctttacttaattagcaaatccaaatatggcactttcttcttcatcatcttcaacatccatatttgctttagctttgttcactcttttgcttataggaagttcttcagctcaactctctgagaacttctatgatagtaaatgtcccaaggttttctatgccgtaaaatccgttcttcaatctgctttggctaaagaacctcgccagggagcatctatcgttcgcctcttctttcatgactgctttgtcaatggttgtgatggatcagtactacttgatggcccttcctcagagaagactgcacctcccaacaataactctttgagaggttatgaagtcattgatgccatcaagtctaaggtcgagacagtatgccccggagtggtgtcatgtgctgatattgtaaccattgctgctcgtgactctgttgcaatccttggagggccatattggaaggttaaacttggtagaagggattccacgactggatttttcaaccttgctagcagtggtgtgctcccaggacctggttcttccctcagcgaccttatcaaaagatttgatgatcaagggctctctaccaaggacatggttgcattatctggagcacacacaattggaaaggcaaggtgtgcaagttatagaggtcgcatatacaatgaaaacaacattgacagtttatttgccaaggcaaggcaaaagaactgtccaaaaggtagcaatggaacaccaaaggacaacaatgtagcaccactagacttcaaaactcctaaccattttgacaacgagtacttcaagaacctcatcaacaaaaagggtctccttcattctgatcaagagctcttcaatggaggatccacagattcactagtgagagcttacagcaacaatcaaaaggcctttgaggctgactttgtcactgcaatgattaagatgggaaacatcaaacccttaactgggtcaaatgggcagataaggaagcaatgtaggaggcccaattagaagagacacaacaaataaattatatgaattgtgtgtttgtgtgttacatatacaccctaaaagtggggtagttcttttgtgagttgatctgttaaggtgttttcttgttccttaaaaatttgtattgttaagttcaatttcaattttactagagttattgtaaggaattaattgtaaagcatgtttttcttacatgtaatgtcattttaaggatgtgttgttacggttacaacaattgtaactgttgcaaaaaacgtgatataatgaaagtggaatattgttttctttttaaaagaatgactttcagtatgtattagcttactgaattaattattt

SEQ ID NO: 8748 - DNA, 1395 bp, Glycine max
gtgttgtaattaatggcagctgcaagtatcatcatctccatctcctctgcttcactctttactccaacaacaacccaatgcctcctcaaacacaattacaaggaccatgatcatgttcatgttccatcatcatcatcatcatacttcacaacacacgctgctctcaagatatcaagaccaacaacaacaacgtttggaatcaccacaacaaccaccagggttaataatgttcctcctcgtaggtttagttgttcagcatcgtcatcttcttcctcttccactcttccctcagctcttctatttgactgtgatggagtccttgtggatactgagaaagatggtcaccgcatatctttcaaccaaaccttccaagagagagaactaggtgttacctgggatgtggacttgtacggggaattgctgaaaattggaggcggaaaagaaaggatgacagcatactttaacaaggtgggttggcctgcgaatgccccaacaggtgaacaagaaagaaaagaattcatagcttcactccacaaacaaaagacagaactatttatggcccttatagagaaaaaactgttgcctcttcgtccaggtgttgcaaagattatcgatcaggcttttgctcaaggagtccaagttgcagtttgcagcacttccaacgagaaggcggtctctgcaatagtatcattcttgctgggacctgagagagcagaaaaaatcaagatatttgcaggagacgtggttccccgtaaaaagcctgatcctgccatctacctattagcagccagcactctgaatgttgaaccttcaagatgtgttgtggtggaggacagtgccataggcttagcagctgctaaagcagctggaatgacgtgtatagtaacaaagagcggctatacagcagatgaagatttcttaaatgcagatgcagtctttgactgcattggtgatcctcctgaggagagatttgacttggcattctgtggaagccttcttgagaagcaatacgtgagctagcacattgttaagtgatactcaaagattttgtttgattcaagtctccttcaatatttcctatgagtgcccaattcgacttatgtgttcaagcccaccctttcaagtcaatgatgaaaatatcaccatgggttcaataaagaatcttcatttcttgttaagcttaatttcatttcaagtacttttttttttattattcgtataaatagaatgaatgaggcttaaaattttaaattaattctggaaatatcaaagcttcaatctcttgtaaactaggagaagttgttagattctgagtttcattatcagtttggtttcactctacgaaatgggactaagatttgttatggttaaaatacacttttatttcaaaaaaaa

SEQ ID NO: 8749 - DNA, 1044 bp, Glycine max
gaatgatggggaggttgattaggggtttggaggaaagaggggtttttgaggatgttagtgttattatggttggtgatcatggaatggttggtacttgtgataagaagttgattcttccttgatgatttggctccttggattgatgttcctaaagattgggttgtcacgcatactcctgtgcttgcaattcgtccgccttctggtaatgatccggcggatgttgtcgctaacatgaatgaagggttgagctcggggaaggttgacaatgggaagtttttgagggtgtatttgaaggaggatctgcctagtcggcttcattatgccgcgagtgatcggattgcgccgataattgggttgattgaggaaggtttcaaggttgagcagaagagaaccaagcgccaagagtgtggcggttcgcacggttatgacaatgcggttttctccatgaggactattttcattggacatggtcctcgatttgctagagggaggaagataccgtcgtttgagaatgttgagatttataatttgattacttctattctcaagataaagggagcacctaataatggctctgcctcatttgcagagtctgttcttctatctgctgcataagtgatactaagaccgagtttttattggtggacagcattgcagatgttgaactctagcgaacaaaatatttgatcgctaagctgtatgataggtaatgtgctctctaggagtgatgctcggatcagaaatatgggcatgctgaaagaataggggtcatatacctttgcacgcgattgctgaaattagtctatatgtaataaaggtagttccatccacttggttccatttttgtttgttatgagcagcacaagtagagggcaagcttagctttaacaacgtgtctgtaagtagtatacgatcacaggatttaaatgttcttgagctagagtgagatccccatttggatctcaaggatccatggatttgaacactaaactgtttccacctttcagttgtttttaatttctcaactctcatatttgctgctta

SEQ ID NO: 8750 - DNA, 663 bp, Glycine max
  misc_feature (602)..(609): n is a, c, g, or t
  misc_feature (655)..(657): n is a, c, g, or t
tacggccggggcacccaacgctaaatttctctctctttctaaacaccactttctcccaaaactcatctagattcttctctcttcaccattccagatgaagaagtccgtcctcgctgcctccgtcgccgccgccgcttcagccaccgcggcatctctctcctcttcttcccatcaggatgagagaagccgtgagaactcttcgtcgcagaattcatcttctacggagaaattcgctcccagatttgatggattgcgcttcattgaaaccctcgtaactgcccatagatgatgattattcgaggttccccacttctcactcaattggggcctcactccttctaactcatcccttccctttaccttttttttttcctttcagttatgccctttaggaaaaaaaaaatcatctatgggaaaattttcaagtcttttacttctgtttttccccctcttagtctttggagaattatagaaagaaaaaaattgtaattttacggaattatttcattgccctttctgggaaataaaaaagtaaaaggttttagattaaaaaaagtgttatatttatctattattatgtatttgtttatttccattattcnnnnnnnntaccaatcctcgatttttttaatattaatgtggtgtggctactcgnnntcccca

SEQ ID NO: 8751 - DNA, 652 bp, Glycine max
  misc_feature (622)..(622): n is a, c, g, or t
  misc_feature (634)..(635): n is a, c, g, or t
  misc_feature (646)..(646): n is a, c, g, or t
ggcacgaggcctcgtgccgaattaaacccaacgctaaatttctctctctttctaagctccacattttcccgttactcccatctagattcttcagttctcccttcaccactccagagatgaagaagtccgtcctcgctgcctccgtcgccgccgccgcttccgccaccgcggcgtccctctcctcttcttcccatcaggatgagaggagaagccgtgagaacacttcgtcgcagaattcatcttccacggagaaattcgctcccagatttgatggattgcgcttcattgaaaccctcgtaactgcacatagatgatgattattcgaggttccccacttctcactcaattggggcctcattcttgcttccctcatcccttgcctttatcttttttctttttctgttatgccctttagaagaagaaaaattcatgtatggggaaattcttaagtcttttacttctgtttttcccccctcttaggagaattagagagaaaaagattgtaattttacgggattatttcattgccctttctgggaaataaaaaagtgacaaggttttaggtttaaaaaaaaaaattattacattatttgatttaccaatcatgatttttatataatgnggtggtcttgannccaagaaggcnattgcc

SEQ ID NO: 8752 - DNA, 1959 bp, Glycine max
cacgcgtccgaaaggggtttccgcccctccgcttcttcttcctcttcttctgtgactccattcatttcatcaattcactttccttagtttcttgcagcttcacactgtgccactgctccgttttagggttgcaatggcgctgttcctcctctacgagtcggcgtcgggttacgcgctcttggaggcgcacggcctcgacgaaatcgggcacactacggaggccgttcggaactccgtttccgacctcaacaggttcggcaaggtcgtcaagcttcgctccttcaaccccttcacctccgccctcgacgctctcaaacagtgcaacgccgtttccgaagggctgttgactgatgagctgagaacggttttggagactaacttacctaaagttaaggaaggtaagaagtccaagttcagtttaggtgtatcggatccaaagattggttcccagatatctgaacttactaaaattccttgccaaagtaatgagtttgtcgccgagctgcttcgcggtgtgcgcctccattttgataggtttgtcagtgatctcaagtccggggatttggaaaaggcacaacttggtctggggcatagttacagcagagcaaaggtgaaattcaatgttaaccgtgttgacaacatggtcattcaagcaattttccttcttgatacacttgataaggatattaattcattctccatgagagtcagagaatggtattcttggcattttccagaactggtgaagattataaatgataattatctgtatgccaaagttgctaaatttattgaggataaatcaaagctgtccgaagacaagatttcatccttaactgacatagttggcgatgaagataaagcaaaggagattgtggaagctgccaaggcttccatgggacaagatttgtccccagtggacttggttaatgtccaacaatttgcgcaaagggtgatggacctttctgagtacaggcggaagttgtatgattacctggttgctaaaatgaatgacattgcgccaaatttggcctctttaattggtgaagttgttggtgcacgattaatttcccatgcaggtagcctcacaaatttagctaaatgcccttcttcaactcttcaaattcttggtgcagagaaggctctgttcagggcattaaaaacaagaggaaacactcctaaatatggtctgatattccactcttcttttatcggtcgagcatctgccaaaaataagggccgaatagctcgctatcttgctaacaaatgttcaattgcttcacggattgactgcttttctgaaaggggtactactacttttggggagaaactccgtgagcaagttgaggagcgacttgatttttatgacaagggagttgcccctcgtaagaacatagatgtcatgaagtctgctattgaaagtgttgaaaccgaatatacagcgatggaaacagaagcaccagttgaagtttcaggcaagaaagccaagaagaagaagcataaagcttccgttacagatgatggtgataatatggctgtagataagatcacagagactacaaatggtgatgcattggaggatcataagtcagaaaagaagaagaaaaagaaggaaaagaggaaattggacttggaggtggaacttaacgatcaagccatggatggtggtgctaatggggttgaaagcgaacaagatggagcagttaaaaagaaaaagaaaaaggataaaaggggtgataatggagaagtactagaggctgctattgagactaagaagaagaaaaagaaataaaaaaataaagatgctgagtaaactacggagtgctattttaactggtgaaatcggatttgtcatgatactattttggataatgtctagtttattttttctgctatgaacttctgtcagttgctttgcttcaaaaaaaaaaaaaaaaaaagaaaaaaaaaaaaaaaaaa

SEQ ID NO: 8753 - DNA, 1726 bp, Glycine max
aaaatttatccataaaaagataccagggttattatcgtgacatttgaactggggatgacacggtgctaccttttctagggctagcagcactgtaacctcaactcacctctcccaaatccgttccctctttcaaacctttttttttttccaccaaatcggcgatggcaacgacgtcggtggtgccggcgaaccggcgtcgcgcggcgaaccccgcggaggagatggacttcgagacgacggagggcgtgaaggccatcgcaagcttcgaggagatggggatcaaggacgatctgctccgcggaatctaccagtacggcttcgagaagccctccgccattcagcagcgggccgtcacgcccatcattcagggccgtgacgtcatcgctcaggcccaatccggaacggggaaaacgtccatgattgctctcaccgtttgccaggtcgtcgatacctccgtcagagaggttcaggcattgatattgtcaccaacgagggaactggcctcacagactgagaaagttatattggctattggggatttcattaatatacaagctcatgcatgcgttggtggtaaaagtgtgggagaagatataaggaaacttgagtatggagttcatgtggtgtctggaactcctggccgagtttgtgacatgatcaaaaggagaacattgcgcacgagagctatcaagatgctagttcttgatgaatctgatgaaatgttgagcagagggtttaaagatcaaatttatgatgtgtatagatatctcccacccgaccttcaggtttgcttgatttctgctacccttcctcatgaaatactggagatgacaaacaaattcatgacagatccagtaaggatccttgtaaaacgtgatgaattgacattggagggcatcaaacaattttttgttgccgttgaaagggaggaatggaagtttgataccctgtgtgatctttatgataccctcactatcactcaagctgttatattctgtaacactaagcgaaaggtggactggttaactgaaaaaatgcgtaacaataatttcactgtctcatcaatgcatggtgacatgcctcagaaagaaagagatgctattatgggagaatttcgtgctggaacaacccgtgtactaataacaactgatgtttgggcccgtggtcttgatgtacagcaggtttctctagttatcaattatgaccttccaaataatcgtgagctttacattcatcgaattggccgttctggacgttttggaagaaagggtgttgcgataaattttgtgaagagcgatgacatcaagatcttgagagacattgaacaatactacagtactcagattgatgaaatgccaatgaatgttgctgatcttatataatttgtcacgtggtgtgctggatggagtggatttgtcatatcttgtggtagggagtagtgtttgaatgtggtttcttgctatggaatgcattcgtgatgctcttgtacacttttgacttttggtcaaactagaatttttaccttagtgttgactgtaccagaggtagtgtttttctttgctgatgaggttgagaattgagattaatgtgtaaattgtgttgagttgttttatctattgtatcactcttgatattgaatttgtaattttatgcttcaaatggcaggtgatatcttgacttggtttttgataaaaaaaaaaaaaaaaaaaaaaaaaaactcgctggt

SEQ ID NO: 8754 - DNA, 962 bp, Glycine max
gtgagagtatacaacgatgttcttttcctgtatgcgaagaaagattagatagcgtgtgggaaatcaagagcagagctgaaacttcttctcttcacttgaaactgtgtttgaaaaagaaaaaaaacatggccacactattctcacctttgtctctgcactctgctcgcccctcttcttcttccttttcttcttcttcttcttcttcttcatcttctcccttctttgccttttgcagcttccctttgcgctctcgcatttcatctttgaaggcacaaacaattcttcttcagaagatgaagcgcgtggtaaaggcagtggaagaagagacccagcaagaactcaccgctgtggatgagtctgaacaaccatcaacctccgaagcaccacccgttgtggttcccgtttccccatcagatactctcaccatgttctttcaggcagagggaacagtgagtgaaacagctattccagctttaaccaaagctttagaggagacagatggtgttactgatttgaagtttcagcttgccgagggacttgcaattttagagttgaagaagcagacaacagtccaagctacaggagtggcttctggtcttttagaaaccatacaaggttcaggctttaaactacagacattaaatctgagttttgaggatgaagaagttgcagttgcctagactaaatgtgctggtgttataacaatagtttgagggagtaaaaaaaaaatttaaagaacatgcctttcacacattcctgactagagcctcgaacaatcattttggtttgtatagggctgactgaggatattggttattattattattgttgttcttgttatcattattgttattatttcttgaaaaaaatgaaagattatttgatgatgaaagccttcaaaaaaaagattaacaaaaaaaaaaaaaaaaaaaataaaaaaattgtaaaactccgagccgagg

SEQ ID NO: 8755 - DNA, 2586 bp, Glycine max
tccgcacctgttcaagatattatttctctctctaaagtcgatcgccctctctctctctctctctaaaaacctttaaaatccctggaatctgtattgcgtgattgacatttgttcacgatctcccctaacggaagaagctagggttcggattgatttctctgctcataataataataatctgatttgcttttcggaaaataattttgctatggcaaactggagagaacgagatttgtttcacatcgacgagatcgatcccgtggacgcgtcgaacggcgaagatttcgacgattcttcgtcggtagacagtgctacttccgatggttcgaggacgcaggttggacttacggagcgtttgacggatattctcgttgacgagcgcgacggcgatctgttgattcagcagactaatagagaggaccggttgttgtggtggcttcaggctctcgatatgcaagttatgggagcgtgtcgcgccgacgagcggttgaagcccttgctgaagatgaacgcttcctgcggcgtcgcggaagatcctctactggctcaattgactcagcattttgagccatctgaagttggaatattagcgagatgcttctgcgtgccgcttgtttcgttccgcgtcgggaagatcaacaaggaagggactcgcttcagccctacctcgaataggggtaacttgacactcgtactactgccaagttctgatcttcgtctctcattcattggggatgatggtagaacagagagattattcacccttaccaacaaatcccaatgctctgctgttgtggttgatgaaatcccaactgatagttctggccgatcgttccttgtaaggactccagatagcagagctttttatttctggtgctctgaaaagtctaagcttttgggaattgaattgcttggaaagatgaaggatttgctcaagaggaaaccatccattgttgagctgagtggcattagcaagtcacgacttgactgctttgcaactcagcttcgggcttttcttgtggggacaacaggaggcagtagtcatgatagttcagtctgtgcttcaacatctgctaattccatgtcttgctctaatgttgcttctgaaagttcgcacccttcatcttcaaaatttccccgatctcgaaacattggaggtcagacagcaaagggagatacaacactttaccagagtattcttagtccaagatcaagttcttttaaagaggttccaccaagaaacttgtcttctcacaggattgcagccagggagaaaattaagcgtcgtggtgacaatcatcagccaacggttgacaccttgacaaatgattcaacacacattttggatttatcttcaacttctgatcatgacaaagcatcagaagttaccaaaactcttgcattttcaccaagttttctgggatcacttggaaagcttggtggtgttccatcaagcctggggctgagtggggaggtccctcccattgtgtcacccattttttctccctattattgttggtgtcccccaggtatttctacctgtccttccattgcagcagttacgcaatccccaaactcatctattgaaacactgcctttcccctcaggtgcctctttattagccaatcctctatcggttaacttgttggatccagtacaacctctcggtacttccatggactttcctccttttttgcctgatccactggtcagaatgtccttgccaacatctcagcagattcccacattcacaccattaatgtgtgatccaattgttcatgtcccagtgattgacgtgtgctcttcaggtcagggctatcttgtgagtgctggccctgcaatgtcacctagcattccaccattgcatccaaaccttgtgaagccattgattcctgaatctgatgctgtggtgaagggtgcaagagagactctaagattgctacttagtggttcaagccagggtaaccaacagatgatgagggacactctgcctgcaattttaactaatccagacgaaaatcaaaacaatatccttgtggctggaagtcgtggtctttacactggaaccagagatattaatgctattgcaaacagcattgctgctatgggattagtatcactgtctggggtatccaaggtagacagtggagtctattcggagctatgtgaaaactatgggaatttggaagcagtgaaaaattccaacgattcaggtggtggtgcctttttggatgatgagggcggatcttctttggattcgaagcagtagtgtagtgatgaatgcaattgtttttctttttttatttatgtagatctcttttgtttagcaaatgtagatatgcgctgtagcacttttgaatggttttaaagttaaaatttcaccattcaagccttgatcccacgtaggaggatgcattgatgattctttgttgattagatatttggaatgtggctgaatcagattttggctagctgtatatccgatttcagtgcatgcaaaggtaaattggtatggaacaatatggcattgtccggtttcctttttttttttttgataggctaaatgaatattattcgaaaaacacc

SEQ ID NO: 8756 - DNA, 1180 bp, Glycine max
cggctcgagcaaagttaggtctataaacaacaacagcttgggttcagtagaaaattgaaaattccaattcttgggtttgaaaacagaacagctaaactaaatcgaagcaaacaatagtgagtgagatcgtgaagaaattagtttggaaatggcagtggcaggttgtcagaagcttctggaactgagcaccaagatcgtcgctgttggcagaaactacgctgctcacgccaaggaattaggcaacgccgttcccaaggagccggtgttgtttctgaaaccgacgtcgtcttacttgaaaaacggcggaaccatccaaatcccacacaacgagggctctctgcatcacgaggttgagctcgctgtggtcatcgccaagaaagcacgtgacgtctccgaatcctctgcgatggattatgtcgccggttatgcactggctctggatatgactgctagggaccttcaagctgctgctaagtctgcaggtcttccatggagtttggcaaaaggccaggacactttcaccccaattagttctattttgccaaagactgcagtgccaaatcctgatgatctagaattatggttaaaggtagatgaggaaatacggcaaaagggctcaaccaaggacatgatctttaagatcccatttctaattagctacattagctctgtcatgacattgtttgaaggggatgtcatactaactggtactcccccgggtgttggccctgtcaaagagggtcaaacaattactgctggcgttacaggccttgtggacgtacagtttaatgttgaaaaaagagctaggcctgttctttcttgataaaaccctcctcgaaggtactacagttctacagaaaatatcttgccaaaaggaaaccaggggacacaataaaaattcagttatatggacttgagagtctacgatatttaacagtttatttttttgtaatggtcgtcgaatccgtactatagatcttttggagtgctattttagacttttgtcatgaaaatgattatgatgatgggcgactttctatttatggtggatgtgcttttttatactgtggacaataaggattataatggagcgcatatggattccttttaaaaaaaaaaaaaaaaaaaaaaaaaaacaaaaaaaaaaaaaaaaaaaaaaaaaaaaaaaaaaaaaaaaaaa

SEQ ID NO: 8757 - DNA, 1269 bp, Glycine max
aattcggcaccagctctgaagctcccatatccaggccacgtgtggatttgatattccattggctctcatttcatattttcgttccaagcagaacatcacaccttatccatcatctggatatagcagcagataaagcgtcagaattaaaacacaaacgaggtttttatattgttccattccacctaattcattctgccacgccttcttaatttctctgatttgattcatggctttagcactttcctccactgcattgtcaagccttccaaacagagaaattcgtcaaaagggtttcccagacagaacacccacatgcttgagtttgaccagaagaacagttgcaaatgctacaaaaggggtctcagttgtctgtgagccacttcctccagataggccattgtggttccctggtagctcacctcctgagtggcttgatggaagtcttcctggtgatttcggttttgaccctcttggattagggtctgatccagagttgctaaagtggtttgctcaagcagaactaatgcatgcaagatgggcaatgctcgcggtgttcggaattctcgtacccgaattgctcgaaaaaatcggttacatcgaaaacttctcttggtacgatgctggtgcgcgagagtatttcgtggacccaacaacattgttcgttgtgcaaatgggcctgatgggctgggtggaaggccgaagatgggccgacatggtcaatccggggagcgttgacattgagcccaaagtgccacacattacgaacccgaagcccgatgttgggtacccaggtgggctttggtttgacccaatgatgtgggggagagggtcaccggagccagtgatggttttgaggaccaaggagatcaagaatctcgagccggcaatgttggcctttgttgggttctggttccaagctatttacactggggaaggacccattgaaaatttgatggcacaccttgctgatcctggtcactgcaacattttctcggctttcacgcgttagtgcaatgtatagtttgaagaaaagaagacggaagacgtgcgtccggaatgaacatagctttatgctgcaccagcaatatccgttatttactttatacatgtactttgcttcctaatccaagttttacaattgacacaagggtttgatttttttaaacaaattcgaattactattgtttttttttcatcttttaaattaaaaggccaatttcgtggatggtaaaaaaaaaaaaaaaaaaaaaaaaaaaaaaaaaaaaaaaa

SEQ ID NO: 8758 - DNA, 3080 bp, Glycine max
  misc_feature (960)..(960): n is a, c, g, or t
  misc_feature (1107)..(1107): n is a, c, g, or t
ccacgcgtccggtcaagcccatttggaagcatcatcctccatgatctcatcaagtggcatgtgctgtatatctgatgtcaagagatgtccgagtatggctattactaatcaacaaggtaattgcttagaactgcaaaagtcggatacttacaacaatgattcttctcatatcaaagtgtatggtttctcaatcagttcaaatccaatgatttttacagagaataaatcacctatccaagtgggtaagcaattgaccatgatacaacatgaaagtgacaaggatgttctcccaggtgctacagatcaagttggtgaagagcttagtgatcatacgatttgtcagacagctaaagtagatttaaaaattcagtcaaatggacaaatttcttctaatcttggttcaaaatgttgttatgttggaagcattcaagattcaccagatccatcattaccagcaaatagtgaagacaacattagaactgtgaatgattccaatacagcatctgatgcatcagaacataatggaataagccttgaccctgtaatttgtgtggacaaaaatgatgccttttcacctcataatgtcgatgtgcttcagaatgagggtgctgtatgtgaggatgcagagtgcttgaagccagctgttgttgagattggcacctcaaatgatatgcgtgatattgtgaaagaggtaaaatgtaaaggtccagagcaggatatgaattctgtctcaacatctgatgactgtttgggtgaaaagggaattttggacattcggtcaagtccatccttgtcagacgggggagattgcgttccacaaagttcgcctcctactacgtctgtttgcaatgtttcgacatcagacagtagtaatatccttcacaatggaagttgtagccctgatgtacatttacaccagaaacaaattgtatgtggtcctgtcgatcgtggtaaagatgngggatgtggcaattcaacaatcaatatgtatgggtaagtcaactgaagcaggacgtgctgctttgttgtactttgaagcgatgcttgggacattgacaaggacaaaggaaagtattggtcgagcaacacgcatagctattgactgtngcaaagtttggtattgcagataaggtcatggaaattcttccccattgtcttgaaatggagtctagcgtgcatcggagggtggaatttgttttttcttgttgactctattgcacagttttctcgtggtttaaaaggcgatggtatgtggagtatattcatttgctatccaagctgtccttccacgactattatctgctgctgctcctcctggaaatactggccaagaaaaccgtaggcagtgtctcaaggcaagttttaaggctgtggttggagcgaggaatcctaccagaatccattattcggcgacatatccgggaactggatttatatagcagttcaggtggtatctacttgcggcgatctatgagaacagagagggctttggatgaccctgttagagaaatggagggcatgcttgttgatgaatatggaagcaactcaacttttcagctgcctggattctgcatgccccaaatgcttaaagatgaagatgatggtgaagggagtgattctgatggcgggaactttgaggctgtcacaccggagcatacttctgaaatatatgaaataacttctgcaattgaaaagcacagacatatcttggaagatgttgatggtgaacttgaaatggaagatgtggctccctccaatgaagttgaaatgaattcaatttgtaatgttgatagagaaaatgctaagcagtgtgagaagaatctgcctctgttctttgctcctctacatcaggatatgcggtcatcttccccacccccactatcattccttcctcctccacccccaccttctattccacaccacatgccatctacctctgatccatataacaccgtagttaattcaaaaggttgtactgtttcacagactctgaaagaaaaccaccacccacttcactctgtggctcagctcatggctgcaccaaggcatagccaacctatctgtgatgcagtgcaccatcaagtccctgaatacagagaaatgcagatgcacatgccagaatctacttgctctttcaacagttttcctgtaccacctccagagaattttcgacatactgatggtgttactacacataataaaggatactctatacgaccacctcaacatgtgccttgcaatcagttttcttttgttaatggggaacagcatgtgaaacatcgaagggaggttccaccaccccctccttactccagtagtcaacactttgtgcagaacatggagagagagaacttctataataatcatgagagattaaggccacctccttatgtttaccaagagagatggaatggtcctgcaccttatcccggtccttggtatcaggaaaaaggtgtgcctcccccttatggttgtcatccatgtgaatcaagtagaataccagatcatgggtggagatttcctcctcggtctatgaatcagaggaactcaatgccatttagaccaccctttgaagatgcaattccagttgcaaacagaggtccgggcttttggcggcctaggtgatcagaaaattcccagaaaccatggctgtatagcccactttttgggctgggctctggtcttgtttaggaaaaggtgatttatggtccttcattctttacatgcaagaatccttggagggggttcggcggaatctgcacaggacatgtgaatgatctgctaggttttgtacatatgtattatagcctcttctgcagaatgcagggcaggaagtgtaatcgtagagtttttggagaggggtgacctatttaggttgtcatgtgtcaaaatttttttgctccaaattttataatttatttcatggaagcccttatagaagttagatgaatatatatatatatatatatatatacaaattttcaggggatgtttcttgaaattgttctcttgatatttggaaaaacttcctctagcattttcggtcaactttgattcactctttaaaaaaaaaaaaaaaa

SEQ ID NO: 8759 - DNA, 1891 bp, Glycine max
  misc_feature (1886)..(1886): n is a, c, g, or t
ctcgagccgcttctccgaacctctccaactccctcccagagataaaattcctttcgccccacgcacactccaatatttaaatcaaaaaataattttaagatcaggaatcaggaatcccaatcgtttcaaaccctagaatcccaatcgatctctctctctctctctgcttattgcaataacctaacctggtgtcgtgatccgggcactggaactagggtttgcgctttctgtgttcaacaatcaagtttcaagaggagaggagaagagatggatgactgttgtgccgtttgcgctgagcctttggaatgggttgcgtacggaccctgtttgcaccgggaggtgtgttccacgtgcgtcgctcgtctccgtttcatctgcgacgatcgccgttgctgcatctgcaagaccgaatgcaacctcgttttcgtcaccaaggctctaggtgattatacgaggatgatcaatgatttttcgacccttcctttggaggcgagggagggcaaggttggatcatattggtaccatgaggatacaaatgcattttttgatgatgtggaccattacaggatgatcaaggctatgtgcaggctttcgtgcaatgtatgtgacaagattgaggatcaaccacaggatgctgcttcaaggcggcgagcaaagtttaggaatatagggcagttgaagggtcatttattccaccgtcataagttgcatatgtgcaatttgtgtttagaaggaaggaaggtttttatatgtgagcaaaaactatataccaaagcacagttgaatcaacacgtaatctcaggtgattctgaggtggatggaagtgagagtgagagaggcggtttcatggggcatcccatgtgtgaattctgcagaaccccattttatggagacaatgaattatacatgcatatgtctacagaacattatacttgtcatatatgccaaaggcagcatccagggcagtatgagtactataagaattatgatgacctagagatccacttccgtcaagagcacttcttatgtgaagatgaggcttgcctggctaagaagtttgttgtttttcaatctgaagcagagatgaagaggcataatgctattgaacatggagggcggatgtcccgctccgtgcgtacccccccccttcagataccaactagcttccgatacagacatggtaatgaacatgagcaacgccgtggaagaggtcgtacgtttcgtcgtgatactgaaaatcaactttctatggccattgaagctagtttggaaacagctaatgcagagcgaacatttcgtgatcaatcgacatcaagtattgggcaaattgctgttgatgatgggaatgatgatattgattctctcattcagccatttgaatcattagctgctggaggttctgaatcatctgcaagataccttcaagccttggggcatagctctagaaatgggcctctggaagattcttcctttccacctctacccataacttccagcaatggccagcaaaggtccaaacatgaactggaaggttcatctagtaacactatggctgcacgtctgcgtcggcatggcaacagaactgtatccgttgtcaattctggtaatgcttggccagcagcaggccgtggactggtacaaacatcaagtaatccttcacaatctaaaccgtcaacaaataatgttcttggactgtctcgtaacactgggcagatgaaaacagtaattaacagtggaccttcatcatcaacttatgctggttctattcaggctacacaaagaactactcacggacaatttcctgctggttcatcgaggaacacacgcgacaatgtcagaattgttcatctggcatctgctccaaatctcatggagaacaactctgntgaaa

SEQ ID NO: 8760 - DNA, 879 bp, Glycine max
attttattttccttccaattttcgtggcattcgtcactctcgtgtcgggtgaaggcgaaaaccaaatcaagatgctgagagtgggcgcaaagaggcttttgggaacgacgtcgttgggcgttagggttccggcgaggctgtaccacgagagggttgtggatcactacgacaacccccggaacgttggatcgttagacaagaacgacccgagcgtggggacgggtttggtgggggcgccggcgtgcggcgacgtgatgaagctccagattaaggtcgacgacaaaaccggaaaaatcgtcgatgctcgattcaagactttcggttgtggctccgccattgcttcttcctccgtcgctactgagtgggtgaagggaaagcaaatggaggaagttctgactataaaaaatactgaaattgcaaagcatctttcacttccaccagttaagctccactgcagcatgcttgctgaagatgccatcaaagcagccgttaaagactatgaagctaagcgtgctaaggcaactgctagcggagaggcagcaacaggagagaagcctgccattgcatgatttctttcatgtataaaaagaatgatgaaaacaaccctttgtttgtttgtctgttattctgttaatcagttgctcattgaagaacaccttcactagactttgggttggacttagttatagctagagagtattcacatcatgcgaagtaaatatttgaaatgccggctatggtttgttatctgctactgggtttgtatttagtagtagtccatcattgactgtatacgcatataataaagcagattggaatgttagaaagttctccataacaataaagtgaatagcatgatatttttcgcaaaaaaaaaaa

SEQ ID NO: 8761 - DNA, 983 bp, Glycine max
aaccaaaaccactcgtcgaccgcaaaagagaaaaaaacaaaaatgctgagaatcgctgctagcgcgaagacaattgttcgaacggggtcgttggaggcgccaccattggggattagggttctgcctcggctctaccacgagagggtggtggaccactacgataacccccgcaacgttggatccttcgacaagaacgaccccaccgtcggaacgggtcttgtcggagcacccgcgtgtggtgacgtcatgaaactccagattaaggttgatgacaaaacggggaagatcgtcgatgctcgcttcaaaaccttcgggtgtggatccgctattgcttcctcctccgtcgctactgaatgggttaaggaaaagcaaatagaggaagttttgaccattaaaaacactgaaattgcaaagcatctttcacttccaccagtcaagcttcactgcagcatgcttgctgaggatgctataaaagcagctgttaaagattatgaagctaagcgtgcctcagcatctgctggtggacaggctacaactggagagaaagctgccactgcttgagtacttcatttctagaatgatgatgaaaacaaccaatagtgtggttttctgacaggactcgatggacactgtatgaacatcttgaggtcagacttcacttggttggagctagtcattgtgattgaattgtattaatgtgaagtaaatacttgtgtctctagctgctttttgttatctgcatggtttatagaagtcaaaccatgtttttattaaaatatgtaaacacaatagagtaaagctatgatatttacatgttgcaacttggaaccatgtaaatatctttcctgaagtaaacagcgactcatatttaccctattttggtttggaccttatgtttatctgttattcaacttaatatgtctcaagaactttaattgttggattagtttagttctctatcttttattgttaaaaaaaaaaaa

SEQ ID NO: 8762 - DNA, 1732 bp, Glycine max
aactactaaagggataaaatatgactactattagtgatgatcagtgattagtgtgattagtgcgtgcgattcattgtgtttgtgtagtagtgagtgactttgggttgggtttcgtctcaactcaacaaacgtcgtcgttctcccatttccaatctttctccaatggcttcttctgcttccttaatcaactcgttgacttgctcttcgcctgcacccactcagcactgtttcgccttcacccgcaccaccgccaccgctaccgccacgtcactgagacaattcaacagccaccgtccgcccccactcaccacgaggatctcctcgtcgccttccaccgttgtctgcaaagctgtctccgttaagccccaaaccgaaaccgaaggtctcaacattgctgacgatgtcacacagctcatagggaaaacgccgatggtttacctcaacaatatcgtgaagggttctgtggccaatattgctgcgaagcttgagattatggagccctgttgtagtgtcaaggacaggattggttttagtatgataaatgatgctgagcagagaggagctataacacctgggaagagtatattggtggaacctactagtgggaacacaggaattggtcttgcctttatagcagcttcaagaggatataagctaattttgacaatgcctgcttcaatgagtttagaaagacgggttcttttgaaagcatttggggccgagcttgttttgactgatgcagcaaagggcatgaatggagcagtacaaaaagctgaagaaattttaaaaagtacccccaattcatacatgcttcaacaatttgataatccttcaaatcctaaggttcattatgagacaactggcccggagatatgggaagatactagaggaaagatagatattttagttgcaggaattggaaccggtggaactgtttctggagctggccaattcctaaaacaacaaaatccgaaaatacaggttattggcgtagagcctctggaaagcaacatacttacaggtggaaagccaggacctcacaaaattcagggtattggggctggttttgtgcccaggaatttggatcaagatgtgcttgatgaagttatagcgatatcaagtgatgaagcagttgaaactgcaaagcaattagcactccaggaaggcttgctggtgggaatttcttcaggagctgcagctgcagctgctttgaaggttggaaagaggcctgagaatgcaggaaagcttattggggttgtcttcccaagctttggtgaaagatatttgtcaactattcttttccagtcaatacgggaagaatgcgagaaaatgcaacctgagccatgaattgactttgcttgttaatgtttcatactcattttccacaagtatctgtatggaatgacagtgtcagatgtccatgttatgcccgtgtttctcatttttgacactcaagaaattagataactgtgtacaggtcattgatttgacttacaacacagattaatgacccttgattgaagaaattttagatgtaataattattggcattgatgacaacgtagcaaatttctgccttatgttcgctattaaaaaataattgatgaaacagtttatctatttctttttgtacactgccttctctttggactctaaccctttgtttggttagagaagaaaagagaggaaatgaaaggaaattttcaaaaaaaaaaaaaaaaaaaaaaaaaaa

SEQ ID NO: 8763 - DNA, 1520 bp, Glycine max
tcagctacgtaggcccccccccccccccgatatgtatgatccacctttaggccaattagaccatggctgcgagttgtcgacattccgggggtgttgtgttaatctcattcacacattcacagttatactctctctctctttgtcgcttggatcactgatctcatctcaattttcagatatgtcgacatctgataagccagaagtggtggaaaggggtagcaaggatgaaaaacacaaggaagatgatcaagaggaggggaagggtggattcattgagaaggtgaaggatttcattcatgacattggtgagaagattgaggaagctattgggtttgggaagccaactgctgacgttactgcgattcacattccatcgattaatcttcacaaggcagatcttgttgttgatgtgctcatcaagaacccgaatccggtgccaatccctctgattgacatagattacttggttgacagtgatgaaaggaagctagtttctggattgataccagatgcgggtaccatcggtgcacatggagagcagactgtcaaaattcctgtcactttgatttatgatgacatcaagcaaacatatgctgatattaaacctggaagcatcattccttatagggtgaaggttagtctcatttttgatgttcccatcttgggaaggctaactctacctttggagaaaactggagaaatccccataccatacaagcctgatattgatcttgagaagattcattttgaaaggttctcttttgaagagacaattgcaacgcttcatttgaagttggaaaacaagaatgatttcgaccttggcctcaatgcgctcgattatgaggtctggcttggtgatgttagcattggtggtgcagaactcaccaagtctgctaaaattgagaaaagtggaattagttatattgatattccaattaccttcaggcccaaggattttggctctgcactctgggacatgattagaggaaggggaacaggttacaccatgaaaggacatattgatgttgacactccctttggagcaatgaagttgcccatcagcaaagaaggtggtactacccgtcttaagaaaaagaaggaagatcgtgattatgatgacgatgacgatgatgaggattgaagaattgtagcaggttattactagctattaataaaagcaggcattactttctgagttctgatgggcaatttttatgtatcttgagagttcaagtggacattcaaattatgtgctagtatcagtattttagtgaatatatgctgctgcagtccggcttgtgttttctcttgaaactttcttgttgtacttaattgatgatcatgacaatctagtgctgttttaatgtgagataaaagatcatttgccttggaaaaaaaaaaaaagccggttttatttattttatctaagaggtgggggttttgctttgtcactgcggaattgagaattgactatggccttttttgcgggttgcgtcatgtgtgtggttttttttaccctg

SEQ ID NO: 8764 - DNA, 721 bp, Glycine max
  misc_feature (622)..(622): n is a, c, g, or t
  misc_feature (638)..(638): n is a, c, g, or t
  misc_feature (652)..(652): n is a, c, g, or t
  misc_feature (657)..(657): n is a, c, g, or t
  misc_feature (660)..(660): n is a, c, g, or t
  misc_feature (673)..(673): n is a, c, g, or t
  misc_feature (679)..(679): n is a, c, g, or t
  misc_feature (686)..(687): n is a, c, g, or t
  misc_feature (689)..(689): n is a, c, g, or t
  misc_feature (698)..(698): n is a, c, g, or t
  misc_feature (702)..(702): n is a, c, g, or t
  misc_feature (709)..(710): n is a, c, g, or t
  misc_feature (716)..(717): n is a, c, g, or t
acaattttgtatttttaaaatttatttaattatttccctcctacgaaatcttgatctctctgctgttgtgttttgttaatctcattcagacaatcacagttatactctctctctctcactttgatcactgatctcatctcaattttcagatatgtcgacatctgataagccagaagaggtggaaaggggtagcaaggatgaaaagcacaaggaagatgatcaagaggaggggaagggtggattcattgagaaggtgaaggatttcattcatgacattggtgagaagattgaggaagctattgggtttgggaagccgagtgccgatgttactgcgatacacattccatcaattaatcttcacaaggcagatcttgttgttgatgtgctcatcaagaacccgaatccggtgccgatccctctgattgacatagattacttggttgacagtgatggaaggaagctagtttccggattgatacctgatgcgggtaccatccatgcacatggagagcaaactgtcaaaattcctgtcactttgatttatgatgacatcaagcaaacatatgctgatattaaacctggaagcatcattccttatagggtgaaggttagtctcattttntgttccatttggaagntacttaccttgganaactnganaattcctcctcancctgantgactgnnanatttttaangttnttttgannacaatnncctt

SEQ ID NO: 8765 - DNA, 1795 bp, Glycine max
aaatgagcagagctaaaaaatatgctgcaattcttatttttattttcattttttgttttttaagaaaaaaggctaaccttctgactttccaaagaactgagtctagtaatacaccaatggatggaattttcgcttacaccattctcattttgcttaccatattttcatttatgttcttaccaaaaccaaacagaagaagacctcagaaccagacacttgcaaagctccctccaggctcaatggggtggccgtacataggagaaacccttcaactctattcccaagacccaaatgcctacttttccaccaaacataaaaggtatggcgaaatattcaagaccaacatcttgggttgcccctgtgtgatgctgacaagccctgaggctgcacgctttgtgctagtgactcaagctcacttgttcagaccaacatacccgaaaagcaaggagcgtttgattggtccttttgctctgtttttccaccaaggtgaataccacacacgtttgaggaagcttgttcagaggtcactgtctctagaagcacttcgcaacttggtgcctcatattgaagccttagccttatctgccatgaactcttggggtggtgatggccaagtcattaacacatttaaggaaatgaaaatgttttcttttgaagttggaatcctcacaatttttggctatctagagccgcgtttgagggaggagctgaagaagaattaccggattgtggacaatggttacaattcctttccaacgtgcatcccgggaacacaataccaaaaggcactattggctagaaggagacttggcaagattataggtgacataatttgtgagaggaaggagaagaagttgcttgaaagggatctattgagctgcttattgaattggaaaggtgaagggggagaagtgttatctgattaccaaattgcagataacattattggggtgctttttgctgctcaggacaccacagctagtgccatgacatgggttgtaaagtacctgcatgatgaacccaaacttctggagtctgtaaaggctgagcagaaggcaattcacaagtctaatgaaggtaacctaccactgagttgggatcagactagaaacatgcgaattactcacaaggttgtgttagagagtttgagaatggcaagcatcatatcattccctttcagagaagcaatagctgatgtggaatacaagggattcctaataccaaaagggtggaaagcgatgcctctgttcagaaatattcaccacaatccagaatattttccagagcctcagaagttcaacccttcaaggtttgaggtcgcaccaaagcccaatactttcatgccatttggtagtggagtacatgcctgccccggcaatgagcttgctaagctggagacactgattatgatccatcatttggtcaccaagtttcggtgggaagtggtaggatccaagtgtgggattcaatatggcccattccccttgccactgaatggactcccagctagatgttggagagaatctaccagctagaaaagcagcatgggaagaaaacgcatgatatcatatagctgagaagcaatccactttccaaagtcacaaaaaaataattatctttttcttttctatgttgactctgtaatttttactttttatttttccatggtgggggcacttcaatatttacccctctatccttaatccttttctacccctgaaagaaagaagcaacaggggtgtggtgctttatttttcacttcaatcattagtttcaattaaaaaaaaaaaaaaaa

SEQ ID NO: 8766 - DNA, 1022 bp, Glycine max
ggggaccaaaaagtaagtaaataaaaaaaataaaatttgtctgggttgaaacttgaaacttgaaaagcggcgtttgctccgaccgagtgcttcagaggagaagtaatgactgcgatcgcgggaacgcacgtttttggtgttgtgagttttcagctcaaacaagctgaaatgccttttgcatgttcttgcttaatccgcaagcgtattggagattctcctcagcgcaatgtggctctaagacgcagagtaaatggaacaattcttccccaaatcagagcccagaatcttccagattatgttccaaaatccgagttttacaaagtagaagcgattctcaggccatggcgagttccccaggtttctgcggctttgttgaaaatgggaattcgtggtgtcactgtatctgatgtcaggggctttggtgctcagggtggttcaaaagagaggcagggaggctccgaattttcagaagacaattttgttgccaaagttaaaatggaagtagtggtgagaaaggaccaggttgaggcagttattgacaaaattattgaggaggcaagaactggggagattggtgatggcaaaattttcttgatccccatctcagatgttataagaattcggacaggtgaacgtggggagcaggcagctaggatgactgggggccgaagtgacatgttatctgctgtatgactggttggaatgaaagataagcatttgtcatctgcttctcttacccttgtggaatattgaatttactatgctgtatgctttatatgtcttgcacttaattgtgggaagatgtatatgacagacagtattggaagggcactgtagttatgtggtgaagaaaactgagagaaaataataaacaaatgctgagttgcttcatatgccatatgacaccaagatgtgcaataaagttaatgacataaaaaaaaaaaaaaaaaataagtgtgagcgtaatttctctaattaaaatttatatttaatctcagttgttgttatgttaatatttgtcc

SEQ ID NO: 8767 - DNA, 1329 bp, Glycine max
ggggtaccgggcccccccctcgagtcagcttacgtaggcccccccccccgattttcactctaccaaaggtacacacgttgagagagacaggttagttggatacaaaagtggcatcgctcgcagtttgatagggtgcgtgacaagtataaaagggacaacattgaagacaacgttatcatatccttctttgcttggaatggaacaagctgggaagcaaggaattatggtggcgtctcagagtcaaaaccccattgagcaaatccaagcgcgcttcaaggacttggaaactggattccgcctctggctctccaagcagtccctccccgtcgaggccgccgtcgtcaccaccaccagcgccgcccagggcgccgccatcggcgccttcatgggcaccctcaccgccgacgcctcctccaccttccccacccctcctcccaacgcctctctcaatccccaagccatggcgtctcttaaacaagcgcaggctctagctggaggtcctttaattcaggcgcgaaactttgctgtgatgacgggagtgaacgctgggatttcctgtgtcttgaaaaggataaggggaaaggaagatgtccagtctagcatggcggcagcttttggttcaggggccttgttttcattagtaagtggcatgggtggaccaaatcaagcaacaaatgcactcacttctggacttttctttgcacttgttcaaggtggacttttccagataggacaaaagttttctcaaccacctgctgaagatactcactatgctaaaacaagacacatgttgaacaatcttggccttcagagttacgaaaagaatttcaagaaaggcttgttaacagacaacactctgcctttactcacagacagtgctctcagagatgtgaggattcctcctggacctaggcttttgattcttgaccacatccagagggacgcggatttgaaagataagcgaggaagccgaaagtgactgatatgaatagtttgctggcttggaactttgaaagccattgaaaaatggatagtagaaagtttgtgttgcaaatgaattttgtcttttttgtttgttagctctgttccattgttgttgcagtgtacttgataaaatttggttaactaatcagttattttagttgtgccatgacacgtaaatggcttgaaagtaaattagggagcacgaatttgttaactctaaaataagaaaagttattgcttccttgtgtaggaattgttacgtttgatttcattagttcagtccatgatccgttccacagagataaatagataatgctaatcggaacggaagaaaaagacttgcgc

SEQ ID NO: 8768 - DNA, 921 bp, Glycine max
  misc_feature (899)..(899): n is a, c, g, or t
ggtccggattcccgcgtcgacccacgcgtccgcccccccccccaacgttataaaaacaaaacgaaatagagtaatatccccttctttgcttttctttgaatggaacaagctgggaagcaaggaattatggtgacgtctcagagtcagaaccctatagagcaaatccaagcgcgcttcaaggagttggagactggcttccgcctctggctctccaagcagtccctccccgtcgaggccgccgtcgtcaccaccaccagcgccgcccagggcgccgctatcggcgccttcatgggcaccctcaccgccgacgcctcctccaccttccccacccctccgcccaacgcctctctcaacccccaagccatggcctctcttaaacaagctcaggctctagctggaggccctttagttcaggcgcgaaactttgctgtgatgacgggagtgaacgctgggatttcctgtgtcttgaaaaggataaggggcaaggaagatgtccagtccagcatggcggcagcttttggttcaggggccatgttttcattagtaagtggcatgggtggaccaatcaagcaatgcctcaaatgatccaactttttttttctttctatcatcggttgagttttccaaactttttacccttgttttttctaactccaattgtttttgtaatttatatattagatatgtgcagttcctaccctagatgattataggatacaaaggtctatgtatatatggatgaagtagtgctgtagatggatcgtaacttggaatcattttgagccaccttgctgtaaaatcttactcacactttaatcattttagaatcactggtaatacagctacaaaaaaccatggaaagaatgtaattattcaccatgagattctttttacaactncttcttggtctccctttccttt

SEQ ID NO: 8769 - DNA, 1086 bp, Glycine max
aatttgattaggtttaatatagttgcatgtgattaccatttgcatctataaatgaacgctccaaagtgagactgagctttattatttgcgctaacaacaactaacgtgcaagttccaaggcggagaaaacaataatggccaccaacgaggagagggatatggagaacaagaagagtgaggaagaactgaagcatctcgggtttgtgaagattgcggcaatgaaagccttagtgtgtgtgtcgaatctctacggcttcgcaaagcaaaactcgggacttttgagatctgctgttggaaccgtggaagacactgtaaccaccgttctgggtcccgtctaccacaaattcaacgctgttcccaaccacatcctcctttttgtcgacaacaaggtggatgaagctgctcacaaattcgatgagcatgcaccttctttggccaagcaggttgcaagccaagtcacttgtttggttcaggaagtgacacacaaagctgagaaagtagtgagtgaagctcaatctggaggggcacgagcagcagcaaattatgtagccactgagtccaagcaaattgtgctctttggttcagtgaaattgtggactggtctcaaccactatccaccattccatgcagtggctgagatggcagttcccacagctgcacactggtcagaaaaatacaacaatgtggtcaagggaacaagtgagaagggttatgccgtgtttgactatttgcctctgattccaattgatgacattgctaaggcgtttaaacacggagaaggcaatgtgaatgaagatgaagcatgttccgtgggagactgttcttagagcactactaatagggtagctattttcttcataaaatctgcttctggttaggatttgttttgtgtttgagggcaatgtgggtgagaatggaagtgtaagaaatgggttcggagtgtgtggatggtgtaagttaaccaagttcgtagaacgttatgggattatgtcaatggttgcgctaaatgtcaccaagttgatgttgtttcgtccgaaaaaaaaaaatcttgattgtcgtcaaaaaaacaaaaaaaaaaaaaaaaaa

SEQ ID NO: 8770 - DNA, 1350 bp, Glycine max
  misc_feature (1301)..(1301): n is a, c, g, or t
cctcgtgccgggagattaggcaagtggggtccccagatgttgggggtctgaagaagaaagcagtgtcaataccttataagggtgatgataagccagggttcttgaagaagcttgcttcgcgggccggcgcgccagagaatacctcattgtttattctggacaaatttgatgggaactctgaactggttgcagagttggttaccgttaatgggtttaaagcagcttatgcgattaaggatggtgcagaaggaccgcgaggatggaagagtagtggtcttccttggatagaaccacggaaaacattgagttttgacaatctgacagatgctatatctgaagcaataggagataccactgatggcgtggcagttactcttggggttgctgcagctgctgctggacttagtctattagctttttctgagatagaatcaatcctccaggttgttggatcagctgcgctcattcagtttgcaagcaagaagcttttgtttgctgaggaccgagagcaaaccgtgaaacaacttggtgagttcttgaacaccaaggttgcccccaaagaacttgttgatgaaataaaggatattggaaaggctcttctaccatcctctaccgataataaggctcttcctgctccggcagagaaaagttcagagcttgctacagctgatagcactgtacagagagcagtagctactcccgagtccaaagctgaagcagtagcaactcccgagcccaaagtggatgcagtagctcctgaagtaaactctgtgcccaaaactgaagtcaaggcagaagaatcacttcctgtgcaaccaaggccactttcaccatacccatattatccagatttcaagcctccaacatctcctaccccttcacagccctagaccttcacttcttttaatcttgaacagaattccatggaaggcaaatcaattatccaaatatccagcatgtatcaagaggtgtacaactctacaatctataatcctatcagaaatagtcatgcatcttaatttgcagataagatccgtgacataagttgtataattttgaagttgttatgattatccttccactttgtgctactcggtacactttttgtaattgatggatgtgttgtagaggtaggtgtcaagttaacattgtagttattttgagatttagtataacatttaatctttcagttttggagcaagcaaataaggtttatgtatgaaattctgctttgtacggattcatcaacacaaattgactatgcaattgtgaaaagaaaaatgttgatggtagactttttntgaaaatatcaatataagatggatttaattcaaaaaaaaaaaaaaaaaa

SEQ ID NO: 8771 - DNA, 1839 bp, Glycine max
cggacgcttgggttcagctacgtaggccccccccccgaacagcacaaggaaacaaaaccaacccttttgagcttgcacaactctgatggtagttgcacaactacttcagactctctctctctgagtgcctcaccacacagattctgtgatataccaatggaggccctcaatgctgctggcttgacccctctatctgtgctctctgatagaacaaaaacaagaactaaacacccttctgtttctgcatgcaaagtctcaaacttttccacctccaccaacaagaaacaagcattgctgcaaagttgcatatcaaaaactttgcatggggggctgattcttgcagcttcggctgttaatggtggagctgccacagccttaacgtacgatgaggcactgggacaacctttgagcctccctggtactggggactttgatgtgaatggctttgtggagagtgtcgctggctttgcagctgagaaccctgcaattgttgccgggggagtggttgttttggcagtgccattggttttgtctcaggttttcaagaagcctaaggcttggggtgttgagtctgctaagaacgcgtatgctaaacttggggctgatgggaatgctcagctgcttgacataagggcactggtggagattaggcaagtggggtccccagatgttgggggtctaaagaagaaagccgtgtcaataccttataagggtgatgataagccagggttcttgaagaagcttgcattgaagtttaaggagccagagaataccacattgtttattcttgacaaatttgatgggaactctgaactggttgcagagttggttaccattaatggatttaaagcagcttatgcaattaaggatggtgcagaaggaccgcgaggatggaagagtagtggtcttccttggatagcaccacggaaaacattgagtttggacaatctgacagatgctatatctgaagcaataggagatacctctgatggtgtggcagttactcttgggattgctgcagctgctgctggacttagtatattagctttttctgagatagaatcaatcctccaagttgtaggatcagctgcgctcattcagtttgcaagcaagaagcttttgtttgctgaggaccgaaagcaaaccgtgaaacaacttgatgagttcttgaacaccaaggttgcccctaaagaacttgttgatgaaataaaggatattggaaaggctcttctaccatcctctaccaataataaggctcttcctgctccagaagagaaaagttcagagcttgctacagctgatagcactgtacagaatgcagtagctactcccgagcccaaagcggatgcagtagctcctgaagtaaactcagtgcccaaaactgaagtgaaggcagaagaatcatttcctgcacaaccaaggccactttcaccatacccatattatccagatttcaagcctccaacatctcctaccccttcacagccctagaccttcacttcttttaatcttgaacataattccatagaaggcaaatcaattgtccaaatatccagcatgtatcaagaggtgtacaatactacaatctataatcctatcagaaaaagtcatgcatcttaatttgcagataagatccgtgacataagttgtataattttaaagtttgttatgattatccatccacttgtgctactgggtacactttttgtaattgatggatgtgttgtagaggtaggtgtcaagttaacattgtagttattttaacatttagtataacattcaatctttcagttttggagtaagcaaataaggtttatgtacaaaaaaaaaaaaaaaaaa

SEQ ID NO: 8772 - DNA, 3255 bp, Glycine max
  misc_feature (863)..(863): n is a, c, g, or t
agaattcagactgttaacaaacaaaagaaaaagatatttgagacgactgcatcaaaatggagacaattaaataattggagaacatcgcaatcccagcaacatttccactttctcacccacctactcttctcctttctcttcttctgctgctcgatcgatcgatcgatctcgtcactctcttagctaccatggcgactgagaatcctttcaatagcattttgacgacgctcgaaaagcccggtggtgctggcgagtttggaaagtactttagcttgcctgctctcaacgatcgtagaatcgatagacttccttactctgtgaggatacttttggaatctgcaatccggaactgtgatgagtttcaagttaagagtaacgacgttgaaaaaattattgattgggagaatacctctccgaagctggtggagattccattcaagccagctagagtgcttctccaggattttactggcgtgcctgctgttgtcgatcttgcttgcatgcgagatgccatgaacaaacttggtggtgattctaataaaattaatcccttggtaccagttgatcttgtcattgatcactctgttcaagttgatgtggcaagatcagaaaatgctgtccaggcaaatatggaacttgaattccaaagaaacaaggaaagatttggtttcctcaaatggggttctaatgcattcaataatatgcttgtcgttcctcctggatcagggatagttcaccaggttaatttagaataccttggtagagttgtgttcaacacaaatggtgtgctttatcctgacagcgttgttggaactgattcacacacaactatgattgatggccctgggtgttgctggatgggngagtttggtggaatagaagcagaagctgcaatgcttggccaacccatgagcatggtcctacccgggtgtcgttggggttcaaattattaggcaaactacgagatggtgtcacagctactgacttggtgttgactgttacactctcgcccggaaagcatggggttgttggcaagtttgtagagttttatggggaaggcatgagtgaactgtctttggcagatcgtgccaccatagcaaacatgtctcctgagtatggtgcaaccatgggcttctttcctgtggatcatgtcactttgcaatatttgagactgactggcagaagtgatgagactgtttctatgatagaatcctacttacgagcaaataagatgtttgtggattacagcgagccccaagtggagagagtgtactcatcgtatttggaactcaatcttgaggatgtagaaccctgtgtctcaggtccaaaaaggcctcatgaccgtgtccctttgagagaaatgaaggtagactggcatgcctgcctcaacaataaagttggattcaagggttttgctgtaccaaaagaatctcagaataaggttgcagagttcacattccaagggacaccagcacatcttaggcacggtgatgttgttatagctgctatcaccagttgtacaaatacttcaaatcctagcgtaatgcttggagctgcattggttgcaaagaaagcatgtgaattgggattgcaggtgaagccatggattaaaacaagccttgccccaggttctggtgttgtgactaagtatttgcagaggagtggcttgcagaagtatttgaatgagctagggtttaatatagttgggtatggatgcaccacatgcattggaaattcaggggatattaatgaagctgttgcatctgcaattactgaaaatgatatagtagctgcagctgtactgtctggaaataggaactttgagggccgagttcacccattaacaagagctaattatcttgcttctcctcctcttgttgttgcctatgcccttgctggcacagtggacattgactttgacactgaacccattgggatagggaaggatggaacagagatcttcttcaaggatatttggccatccagtgaagaaatagcaaatgttgtacaatcaagtgtgctgcctgatatgtttagggacacatataatgcgatcacccaagggaatcccatgtggaataatttatctgttccaactggcactctttatgcttgggaccctacatcaacttatattcatgagccaccttattttagagatatgagcatgtctcccccaggctctcatggagtgaaagatgcttactgtttgctcaactttggagacagtatcacaactgaccacatctctccagctggcagcatacataaggacagtcctgcagccagataccttatagaacgtggggttgatagacgggacttcaactcctatggaagtcgccgtggtaatgatgaggtgatggcccgaggaacttttgccaatattcgcattgtcaacaaatttttgaatggagaagttggacctaaaactattcatattccttctggggagaagttgtcagtctttgacgttgcagagaaatacaagagtgaggggcatgatatgattatcttggctggtgctgagtatgggagtggaagctctcgtgattgggctgcaaaggggccaatgctactgggcgtgaaagctgtcatagcaaaaagttttgaaaggattcaccgaagtaatttggtgggaatgggtatcattccattgtgttttaagcccggggatgatgctgattctcttggattaactggccaagaacgttacaccattgatctaccaagcaatgtgaatgaaatacgacccggccaagatgtcacagtggtgacagatgccgggaaatcatttgtatctacactgagatttgatacagaggttgaactagcttacttcaaccatggaggcatcttacaatatgtcatcagaaacatggtcaatgctaaacattgaatcagatataaaccaagtttgcaggttgaattgatagcactcactggcgctgattcttaactttggtcttaataatctagtatggcctgctacaaggaaatccattgctattcagctattgtatcaataaaccaaggaactagatggctactacgaggaagagttatgactgtcgtttgttgaagaaatgtgattttctttttcaaaaattctattggtcattgaggatgaaaattccttgttacatttttactggttttacagttgagtttttaggaaacatttgccttctattgctgcctcccgactcttgagaattaaggaaatcaggaacattttttgaaattaaaagaacg

SEQ ID NO: 8773 - DNA, 1693 bp, Glycine max
ctcctttactctctctccctctctattgcccttcaaacacagacacatatctgcacttcacaaccctccaaaccacatttaactatatataaaaccatcattatgaacatggggtttactctcttctcattctgacccttcttcttcttcttcatctacattagtagttcttgttattcattattcttcatactcacacagcttcttctgggggcaaaaggggtcatttttcagatccgaggttgagctcctctacccatcatgatggagctcggatacctgaatcagggtcagccttctagaggaacaacaccacttgtcactcttccattgttgctttcaacacttgtgttcttctccactttcacacatgccttctcttcttctgtgtttccggaattgaatcctattaaacctaggcactcacgtcttctcaggagtgctgtgcaacgagaaactcctacatctcagttgtctgaactatggtcacctctggaaagccaaggatggaaaccttatgttgaatcaaataagccaacattaccagagaagtcagagggatatatccaggtctttcttgatggaggtttgaaccaacaaaagatggggatatgtgatgcagttgctgttgcaaagatactgaatgctactctggtgatcccataccttgaactgaatcctgtatggcgagattcaagctccttcatggatatatttgatgtggatcatttcattgatgtattgaaggatgatatttctatagttaaagagttgcccaaagagttcgcctggagcacaagggagtattatggcttggctattcgagaaaccagaatcaaggctgcacctgtgcatgcatcagcctactggtatctggagaatgttttgcctgtcctacagagttatggtattgctgcaatctctccattttctcaccgactgagttttgacaacttgcctgtggatattcaacacctacgttgtaaagtaaacttccaagctttaacctttgtttctcatatcagaacacttggagatgcccttatcagccgccttcgctatcctcaaggctcagctgaagaaatgggcttcaactaccttcaagaggtcactggtgcaggtgctaggaaaaatgcagggaaatttgttgttctacacctccgatttgataaggatatggcagcccattcggcctgcgattttggtggaggaaaagctgaaaaactggcccttgcaaagtatagacaggtgatttggcaagggagggttcttaactctcaattcactgatgaagagttgaggagtcaaggtcgttgcccaatgactcctgaagaggttggattgttactagcagctatgggatttgacaacagcactcgtttatatcttgcctctcataaggtctatggtggagaggcaaggatttcaactttgagggaattatttcctcggatggaagacaagaagagccttgcttcatctgaagagcgttctgagataaagggaaaagcttctctactagctgcacttgactactatgttggcttgcatagtgacatatttatctctgcttccccaggaaacatgcacaatgcattggttggacaccctacatgcttgttcgttgactcttatttaagcttaatttgttacggaggttattaaactatttgagaatttttaaataggttac

SEQ ID NO: 8774 - DNA, 1091 bp, Glycine max
atctctctctctcttcattcttgaggtcttctttcattttataccattcttcttatttctttttaccaatcactacttattcaatccaaggatggcttccgccggcgatcttttcaggcatggtttgccggaagttggtggtgccgggaagttacacgtgcttgctgttgatgacagccacgtggaccgcaaggtgatcgagcggttgctcaaaatctcgtcttgcaaagtgacggtggtggaaagtggtagcagggctctacagtatctggggttggatggagaaaaaagttccattggttttgatagtgtggatgttaatttgataatgacggattattccatgccggggatgacaggatacgaattgctcaaaaagattaaggagtcatctgtttttagagaggttccagtggtggttatgtcgtctgagaatatcttgaccagaattgatagttgcttggaggaaggagcagaggagtttctgttgaaacctgtcaagttgtcagatgtaaaacgcgtaacagatttcatcatgcgaggtgaagggatgaaaggagtaaaaagatctaaaaaaagaagccgatcagatgattgcattccatctctatcaactgcatttgcatcagtttctcatccatgtgatctatcatcacctccatcaccatgtgtatcgcaatcgaagaaatctagattgagcatatagattgagcagcaatgtttatgtctccatttttgcctaaccattgttcatattcaaaagcctctgatgtaatttgcgtttttacactaaacattgctgacaacgactactagaattaggaatgaggaagaggatgacagagtcattttgttctttagttcggtcgcttacatatttttttgctgattttgctgctgtacagagaaagttcattaaattaatgaaaccctctattttgaggggtcttccaatattttggttacttctgtctctttatatttcactaacaacattctggaatatgttcaaattttggaccctttacttagcctatgtttggatgggaggttgaataaagaaggtagaacctgaagttgatttttaagtg

SEQ ID NO: 8775 - DNA, 1381 bp, Glycine max
gtaacagataggaatgagatagaatagagcataactttcactccctacactctcagtctgagaagcagtaaaagaaaatggcttcactttccctctccacaccaacctctctttccttcgcatcatcctccatcttcttctcttcacgccaattccacactttctcttcttccaaatccaacaacaagtttcccattttaccctccaaaaaacccctatccatttcctgcaaggcctcccctcctcttcccgtcctcaacttctccggcgagagggtcggcgagtcctttctcgacctccgctccgcccctcccgacaccgcccgcgccgtcgtccaccgcgccgtcgtcaccgacttgcagaacaagcgccgcggcaccgcctccaccctcacccgcggcgaggtccgcggcggcggccgcaagcccttcccacagaagaagaccggccgcgcccgccgcggctccaaccgcacgcccctccgccccggcggaggcgtcgtcttcggcccgaagccccgcgactggtctatcaagatcaaccgcaaggagaagcgcctcgccatctccaccgccgtcgcaagcgccgccgccagtgccgtcgtggtggaggacttcgcagcggagttcgccgagaagccgaagacgaaggagttcatcgcggcgatgaagcggtgggggctcgacccgaaggagaaggcgatgttcttgatgacggaggtgccggagaacgtgaggctatcgagcaggaacattgggaccttgaagatgcacacgccgaggacactgaatttgtatgatattcttgatgcggataagcttgtgctcacgcagggtgctgtggattacttgaatcagaggtatgggggtgattatcaagggagtgatgatgaagatgaagaagaagaagaagagggatatgaagagggtgaggaggaaggtgtagtggatggtgaagaaggacctgacgcaggggatagtgatgtggtaaattgagggtttaaagtcttctttgtgccattttatagaggaagttgctgatacagggatggaaggtctaaagtcttatttatttctaccaatttatgtttctttcctttccatcacataggatcctaatcttggtaacctgtaaggatatttgcctttgcccaatttcaatcatattagcttgcaggctcctttgtgtaatttattgaatcaattttgttgcttgtagtttgttttgtgcaaatgcatgtatatggataagtcaattgttttgaataaattttgttgcatgtaaaaaaaaaaaaaaaaaaaaagtgtcttcttcgaatctattgaaggccactggttgataaagtcattcatagcgtactgataactggtaaaaaaaaaaa

SEQ ID NO: 8776 - DNA, 1002 bp, Glycine max
gcagcataccatatccaatcattctaacggataggatagaaaagagcaaaactgtttgagtctgagagaacttgaaacaacaatggcttcactttccctctctctctccacaccaacaacaccaacctcactctccttcacatcatcctccatcttcttctcttcacaccaattccacacacacaataattctttcaaatccaacagctttcccgttttaccctccaaaaaacccctctccatttcctgcaaggcctcccctcctcttcccgtcctcaacttctccggcgagagggtcggcgagtccttcctcgacctccgctccgcccctcccgacaccgcccgagccgtcgtccaccgcgccgtcgtcaccgacctccagaacaagcgccgcggcaccgcctccaccctcacccgcggagaggtccgaggcggcggacggaagcccttcccgcagaaaaaaaccggtcgcgcccgccgcggctccaaccgcacgcccctccgccccggcggaggcgtcatcttcggcccgaagccccgcgactggtccatcaagatcaaccgcaaggagaagcgcctcgccatctccaccgctgttgccagcgctgccgccagtgccgtcgtggtggaggacttcgcagcggagttcgccgagaagccgaagacgaaggagttcatcgcggcgatgaagcggtgggggctcgacccgaaggagaaggcgatgttcttgatgacggaggtgccggagaacgtgaggctatcgagcaggaacattgggaccttgaagatgcacacgccgaggacactgaatttgtatgatattcttgatgcggataagcttgtgctcacgcagggtgctgtggattacttgaatcacaggtatgggggtgattatcaacggagtgatgatgatcatgaacaccctcagaacgatggatatgatgagtgctagcgagaaaggtcacgcctgggaagaccagaccatacaggaagaatgcgtga

SEQ ID NO: 8777 - DNA, 787 bp, Glycine max
tttacgcgtccgacggctgcgagaagacgacaggtgggggttgaacttcattgtttttggctaagcctcgaaatccagaaaaatcgtgagcgaagatgatgcacatgaccttttactggagcaggaaggtgaatctcctaatagattcatggaagaccaacgattggacggagtatctcatcactctgctcgcatgcctcgtcgttgccgccttctaccagttcctagagaatcgccgcatccgcctcaagctcatcggcgccggaaatcccttcccggcagagatcgaggccccgcttctgcgacggaagcttgccggaaaccgcgccaaggtgggcgtgaaggtagccggagcgtttctgttcgggctgagctcggcgatcgggtacttgctgatgttgtcggtgatgtccttcaacggtggggtgtttgtggccgtcgtcgtgggtcttgctgttggttacttcttcttcaggaacgagggcgaagattcccttgtcgttgatacttcgtgtgcctgtgcttaaatcttccaatttcctgtaataataataatataataggagtagtagtgcttgttaattatttttccgttcatttctagtattttccgtttttaatttagcaaacttgtttcaaggaatttgggatttgtgatttcgtatatgaaattgtaattaactgtaattgtaatcaagatagtacaatgggaactcttgattctaaagttgaatttattgtgtgattcagaggcaaaaaaaaaaaaaaaaaactcgagactagttcc

SEQ ID NO: 8778 - DNA, 821 bp, Glycine max
tttctgaaagattatggtcttagaatgcacttgtctccctttgtgtgattaattaattcctagctacgcacgacacagacactggtccacacagccaagaatggtagatccagctactgaattggtgccaccaccatcttcacccaccaattcatccatttcctcctctgatcttgacaccgagtctacgggatcctttttccatgacagaagcaccacactgggcactcttatgggtgtcagcttcccagctattaccttcagagcctccgacccccatccaaattccgccaccgccaccgccaccgctgctgccggaggccctcgtagggctgcgggctccaagaagaagagggcgatcgcggtggcggagaggcggaggaggtggtggtggctgtgcagggacggtgacgcgaggccggcttcgctcggtgagtttctcgaggtggaacggcgctgcggggacggcgccttttacggcacggcggcggaactcgaaggaatggtgatggacccgcagagtagccatggccgggctttgttttccgacgggagggttcttccgccggctggcgttgatgacgatgcgtcgacggcggggagtctttgtcgtagattcccggttttgctcaccgggatctgtagcggcggtgctggataagatattcagttctaattatattcttctgtctttgtctaaaaagacaaatgcttaattatttttgtaggatcgcttggatgtttgcttatttgattggtatatgaataagattcttatgcctgtaaattacatggtttggctttctcggcctctccctttc

SEQ ID NO: 8779 - DNA, 896 bp, Glycine max
gaatcatgaaagcccatgcatttttactcaaaattcatatacatttacattcatatacagacccgggttagaagcaaattaccaaacctcaaggatctgaacttacctcaatttaactacctaaaaccaaccaccataaaatccagagagagagagacaaaattagaaccctgatcaaggttttaaattatagtctcatttatagttccatcccgatccttgatgttgcaagaaattgtaaaaatttgcagtgaccccaaaacccttgaagcaagaactgaatttgtagtcacggaacattttttaaaaccttgatcataatgtttaaaataaaaagaaaagaaaaagaaagatccatgaagaaacccatatcctttagctgggcttgtgcaagcttaacaagccattaaagttggtacattcaaacaatgccttagctgtcatttccctctcaaacctccaaacatagttcagccccacaagcagctcagtgatggcagcttctgtcttctccttgtttgcaaagaacaaagtctgcaacaacaacacattggtctttggcaccaagttctgatgctcatagctcctctcactctgccacttgatcatgttatgcgccaaaggtcccaaccacctcaatatcctccccaatgcatccctccactccgcagccagcacatgatcatcacatgctgaaaaccccacccctctcaaccttcccctcaagcatgaccttatgcttcttggcaacatcccatacaaatcatccctagcttccaccccaaccaactggggtgactttatcatcttctccaacaccatcaccaagtttgcatagtgcaaagccaaagctgaagcacccaaagtatcaccatcacccttcaaccggacgcgtg

SEQ ID NO: 8780 - DNA, 1333 bp, Glycine max
  misc_feature (10)..(10): n is a, c, g, or t
  misc_feature (20)..(20): n is a, c, g, or t
ccggtccggnaattcccggngtcgcccacagaaagaaagagagagatagagaaaaaaaagcaaagcaaagaaggttcacgttcacgttctgttctgttctggttcacactttcacgagcctatcaccgactctctgcacctgcaactgcaacttccaacttcaacttcaaccactgcaagcttagctctgaaagaaaagaaaagaaaaagaaaatatctccatttggtttggttggtgaaagttgaaaccttttcacgagctcaagttggtagtaacttttttaacttggcggtctctttttttctacatcgactctcgttgtgttttgcaaagatctgatctgggtcgtggatatttcaatgtgaaagttaaggttttttttgttgcatagtaataattgaaagaaacaaaaaaaggtgggatttttaaagggggtggtggagatggatcgttctgctatgactgttgggccaggaatggatatgccgatcatgcatgacagtgacaggtatgagctggtccgtgatattgggtctgggaattttggggtggcaaggctcatgagagacaagcacactgaggagcttgttgctgtcaagtatattgagagaggtgataagatagatgaaaatgtacgaagggaaattataaatcacagatcactgaggcatcccaatattgtcaggttcaaggaggtaatattgacccctacacatttggctattgtgatggaatacgcttctggaggagagttatttgagcggatatgcaatgcaggacggtttagtgaggatgaggcacgcttcttcttccaacaacttatatcaggggttagctactgtcatgcaatgcaagtatgccatcgtgacttgaagttggagaacacattgctggatggtagtccagctcctcgtttgaagatttgtgattttgggtattcgaagtcctctgtgctacattcacaacctaaatctactgttggtacccctgcatacattgctcctgaagttttgcttaagaaggaatatgacggcaagattgcagatgtgtggtcttgtggggtgaccttatatgtcatgttggtgggtgcatatccttttgaggatccagaggaacctaaaaatttccggaagacaattcataggattttgaaagtccagcactcaattcctgattatgttcatatatctcccgagtgccgtcatctaatctctaggatctttgtggcggaccctgcacagggcagttgttttgccgagattcgagatcacgagtggtttgtgaggaacctgccggctgatcttatggtcgcgaacacactgaacaaccagt

SEQ ID NO: 8781 - DNA, 759 bp, Glycine max
ggaagagagggggcgaaggcgaacaccaccaacaaagaacacacacaactcaaaccccccttctcccttctctcctcttctcttctcttaataatcgcaaagttttctttttttctttttcatattttcttgttctttctattgttgttctgtgtcggtgtttggatcgaattgtctttgattcgagagctgaacgcagagtggggctccgtttggatctgaatttgagcttaatttttgttgaatttgtagctctgattattcttgttgttaccatcaatagtcggtgacaagactgagtgaggttttgatttttcttttaaaaagattattgttttgatgggggaaggtgaagctgaggggagtgatggcgctcccaagaatgttgtggcaaacgacgtcgttgccaatgcgctgttgccgttcgatgttcccgccaagaagttagcgcggcagctcgatttcaccggcttcggcgggatgtcgacgacgccgcagccgcagccgccggtggttttgccgctgcggccttctacttctgtcagggttgggaaaccagaatctcctaaatcaagaccgaggcctggctttgaaattaaagaagctaccccgaagaagcagaagcagtgcaattggaaacattcaaaatgcctgaaactatattgggaatgttttgcttcggggatatattgtgacggctgcaactgggtacattgctggtaccatgtgggaaacgaagcgtgctagacgaggagccag

SEQ ID NO: 8782 - DNA, 2300 bp, Glycine max
  misc_feature (2179)..(2179): n is a, c, g, or t
  misc_feature (2205)..(2205): n is a, c, g, or t
  misc_feature (2262)..(2262): n is a, c, g, or t
  misc_feature (2281)..(2281): n is a, c, g, or t
ccacgcggccgatggcgaacaccaccaacaaagaacacacacaacacaaccccttctcccttctcttaataattgcaaagttttttttttctttctttcgttcttctgtgtcggtgtttggatcgaattgtctttgattcgagagttgaacgcagagtcgggcgccgtttggatctgaaaccagtgaatttgagcttattttttgttgaatttgtagctgattattgttgttgttattatcaataatcggtgagaggagtgagtgaaattttgattcttctttttttttttttttttaaattattgttttgatgggggaaggtgaagctgaggggagtgatggcgctcccaagaatattgtgtcaaacgacgtcgttgcgaatgccctgttgccgttcgatgttcccgccaagaagctcgcgcggcagctcgatttcaccgatttcggtgggatgccggcgccgccgcagccgccggtgattttgccactgccgccttctgcttctgtcagggttgggaaaccagaatctcctaaatcgagaccgaggcctggctttgaaattaaagaagctaccccgaagaagcagaagcagtgcaattgtaaacattcaaaatgcctgaagctatattgtgaatgttttgcttcgggaatatattgtgacggctgcaactgtgtaaattgttctaacaatgtccaaaacgaagctgctagacgagaagcagttgaagctactttagaacggaatccaaatgcatttaggccaaaaatagcaagtagccctcatagaacacgtgatatcagggaggatgctggggaaattttgatattgggaaagcataataaagggtgccattgtaaaaaatctgggtgcctcaagaagtattgtgagtgcttccaagccaacattctttgttctgaaaattgtaaatgcatggattgcaaaaactttgagggaagtgaagagagacaggctttgttccatggagatcaaaataacaacttggtgtatattcagcaagcagccaatgctgccataactggagctattggttcctctggctattcttcaccaccaatatcaaagaaaagaaaaggtcaagaactcttatttgggccaaccgtcaaggatccatcagttggcaggcaggggcaacaggcaaacaatgtcagagttcctgcaccctcctcatccttgtcacctatcccaggtgctcgtgttggaccagcaacattaggtccttcaaaattaatgtacaggtctcttttagcagacatcatacaaccacagcacctgaaggaactttgctcagttctggtgctagtatctggacaagccgctaagatgtttacagaccacaaaaatttcatggataagcatgctgaagatcagacagaaacttctcgtgcttcttcaactcaggagcaattaccaagccaaaaggaggctaatgttgagaaagctatggctgatgatgattgttcaagtgcaaaccagacagataatatcagcccggataattcttgttcagatggtgctgatgccccaaaagggaggccaatgtctcctggaactttagcattgatgtgcgatgagcaagatacaatgttcatgactgctgcctcccctgttggatcaaggacacatgcttgcaacacatctttgcaaccgccttatgggcaagtaatgacagaggtctatgcagagcaagaaaggattgtattgacgaaatttagagattttctcaatagagttatcactatgggagaaataaatgaaacaaagtgctcttcattagccagaagtgaattagagagtcaaaagggcccaaacatgaattgcagtggaaatgacagtactgagacagcacatcagcaggcagccactaataataacattaacggtgttgccaaagctgcggcgggcaactccattttgttccctggtagtggtagttcctgaaaatggggaaacttatcctaaggtagaaaaatagatatgaaaggaatctaacatagatgagcagagataactctggaagaatattgtgtgaaggtatgctacaactctgaactgtaaaaacactttcattcttcattatatgccttctctttgaagtttgaagggggtgtcaactgtcaacccaggcccaccaactaatccaactaggatcaattttnttcttttacttcgctcattcatatanaaattttaattgctctgcttcgtcatctattcattattaattattaattaattaatntaaaagaagttttggtggncaaaaaaaaaaaaaaaaaa

SEQ ID NO: 8783 - DNA, 1286 bp, Glycine max
cacgagaccattacctagaacatcctaatcgaatcaaaaacagtttcatttttgcgttatcgtggagttcaacttcgagggtttccttcacatctctgtaatttccatttccacagttactcttgtgaattagcgagatttgaagcgagtgatggctgcgaaggaagagaatcgaatatttgttggaggtttatcctgggacgttacggagcgtcaactcgagcatgcctttgctcgttacggcaaaattctcgaatgccagatcatgatggaaagggatacaggccgtccacgtggatttgggtttatcacatttgcagaccgtaggggaatggaggatgcaatcaaggaaatgcatggacgggaaattggtgatcgtatcatctcagtcaacaaagcacagcccaagatggggggtgatgatgcagaccaaggttacagaggtggctactcatcaggtggtaggggaagctatggtgctggagatagggtaggacaggatgactgcttcaaatgtgggcgtccagggcattgggcccgagattgtcctttggcaggaggtggtcgtggtcggggtggtagttcatttccttcacgtcctaggtttggagctgctggtggacatggggatcgcctgggtggtgaacgtgatcgatacgttgatgatcggtatgatggaggacgttatggagatagggatcgttttgataaccgtgactacaaatatggcagccgcgaccgctatgctggtgacaggtatccaaccagtggagatcgatttgcaagtgatcgatatggcgctggctcagactacccacaaaatggttatggcaaggaaagagggtatgaccggtacagtggtccacgaggaggtgctgataggtatggaagtggaatgggaggtcgagatgaaggaaggagttataggggtagacctggtccatatgaccgcccaagcaggggttctcgttcatcacttgatcgctactgatttctactgctgatgtttttaacgggaaatccaaatgcagaagccacattagagacctagttcttgttcttgttacgtaggacatcctgtttgggacaactgctactgctagattgtagtttcatagattgtggatttcatagtttgtttccttatttagatcgtgccaatccctgttgatttttcccccgcgtttgcttgacgctttgactaacttccctaatgcaagtaagcatgatttatcgctgcaaaaaaaaaaaaaaaaaaaaaaaaaaaaaaaaaaaaaaaaaaaaaa
